(19) United States
(12) Patent Application Publication
(10) Pub. No.: US 2015/0322449 A1
(43) Pub. Date: Nov. 12, 2015

(54) Plants Having Enhanced Yield-Related Traits And Methods For Making The Same

(71) Applicants: Valerie Frankard, Waterloo (BE); Christophe Reuzeau, La Chapelle Gonaguet (FR); Yves Hatzfeld, Lille (FR); Ana Isabel Sanz Molinero, Madrid (ES); Steven Vandenabeele, Oudenaarde (BE)

(72) Inventors: Valerie Frankard, Waterloo (BE); Christophe Reuzeau, La Chapelle Gonaguet (FR); Yves Hatzfeld, Lille (FR); Ana Isabel Sanz Molinero, Madrid (ES); Steven Vandenabeele, Oudenaarde (BE)

(73) Assignee: BASF Plant Science Company GmbH, Ludwigshafen (DE)

(21) Appl. No.: 14/344,923

(22) PCT Filed: Sep. 6, 2012
(86) PCT No.: PCT/IB2012/054595

§ 371 Date: Jun. 4, 2015

Related U.S. Application Data
(60) Provisional application No. 61/563,563, filed on Nov. 24, 2011.
(60) Provisional application No. 61/549,778, filed on Oct. 21, 2011.
(60) Provisional application No. 61/537,081, filed on Sep. 21, 2011.
(60) Provisional application No. 61/535,420, filed on Sep. 16, 2011.

(30) Foreign Application Priority Data
Sep. 16, 2011 (EP) 11181691.4
Sep. 21, 2011 (EP) 11182171.6
Oct. 21, 2011 (EP) 11186199.3
Nov. 24, 2011 (EP) 11190546.9

(51) Int. Cl. C12N 15/82; C07K 14/415; A01G 1/00; C12N 9/08

(52) U.S. Cl. CPC C12N 15/8261; C12N 15/8273; C12N 15/8271; C12N 9/0065; C07K 14/415; A01G 1/001; C12Y 111/01009; C12Y 111/01012

(57) ABSTRACT

Provided are methods for enhancing yield-related traits in plants by modulating expression of a nucleic acid encoding an ELM2-related polypeptide, or a WRKY-related polypeptide, or an EMG1-like polypeptide, or a GPx-related polypeptide in a plant. Also provided are plants having modulated expression of a nucleic acid encoding an ELM2-related polypeptide, or a WRKY-related polypeptide, or an EMG1-like polypeptide, or a GPx-related polypeptide, which plants have enhanced yield-related traits relative to control plants. Further provided are constructs comprising a nucleic acid encoding an ELM2-related polypeptide, or a WRKY-related polypeptide, or an EMG1-like polypeptide, or a GPx-related polypeptide, useful in carrying out the methods of the invention.

### BACKGROUND

[0001] The present invention relates generally to the field of molecular biology and concerns a method for enhancing yield-related traits in plants by modulating expression in a plant of a nucleic acid encoding an ELM2-related (Egl-27 and MTA1 homology 2—related) polypeptide, or a WRKY-related polypeptide, or an EMG1-like (Essential for Mitotic Growth—like) polypeptide, or a GPx-related polypeptide. The present invention also concerns plants having modulated expression of a nucleic acid encoding an ELM2-related polypeptide, or a WRKY-related polypeptide, or an EMG1-like polypeptide, or a GPx-related polypeptide, which plants have enhanced yield-related traits relative to corresponding wild type plants or other control plants. The invention also provides constructs useful in the methods of the invention.

[0002] The ever-increasing world population and the dwindling supply of arable land available for agriculture fuels research towards increasing the efficiency of agriculture. Conventional means for crop and horticultural improvements utilise selective breeding techniques to identify plants having desirable characteristics. However, such selective breeding techniques have several drawbacks, namely that these techniques are typically labour intensive and result in plants that often contain heterogeneous genetic components that may not always result in the desirable trait being passed on from parent plants. Advances in molecular biology have allowed mankind to modify the germplasm of animals and plants. Genetic engineering of plants entails the isolation and manipulation of genetic material (typically in the form of DNA or RNA) and the subsequent introduction of that genetic material into a plant. Such technology has the capacity to deliver crops or plants having various improved economic, agronomic or horticultural traits.

[0003] A trait of particular economic interest is increased yield. Yield is normally defined as the measurable produce of economic value from a crop. This may be defined in terms of quantity and/or quality. Yield is directly dependent on several factors, for example, the number and size of the organs, plant architecture (for example, the number of branches), seed production, leaf senescence and more. Root development, nutrient uptake, stress tolerance and early vigour may also be important factors in determining yield. Optimizing the abovementioned factors may therefore contribute to increasing crop yield.

[0004] Seed yield is a particularly important trait, since the seeds of many plants are important for human and animal nutrition. Crops such as corn, rice, wheat, canola and soybean account for over half the total human caloric intake, whether through direct consumption of the seeds themselves or through consumption of meat products raised on processed seeds. They are also a source of sugars, oils and many kinds of metabolites used in industrial processes. Seeds contain an embryo (the source of new shoots and roots) and an endosperm (the source of nutrients for embryo growth during germination and during early growth of seedlings). The development of a seed involves many genes, and requires the transfer of metabolites from the roots, leaves and stems into the growing seed. The endosperm, in particular, assimilates the metabolic precursors of carbohydrates, oils and proteins and synthesizes them into storage macromolecules to fill out the grain.

[0005] Another important trait for many crops is early vigour. Improving early vigour is an important objective of modern rice breeding programs in both temperate and tropical rice cultivars. Long roots are important for proper soil anchorage in water-seeded rice. Where rice is sown directly into flooded fields, and where plants must emerge rapidly through water, longer shoots are associated with vigour. Where drill-seeding is practiced, longer mesocotyls and coleoptiles are important for good seedling emergence. The ability to engineer early vigour into plants would be of great importance in agriculture. For example, poor early vigour has been a limitation to the introduction of maize (Zea mays L.) hybrids based on Corn Belt germplasm in the European Atlantic.

[0006] A further important trait is that of improved abiotic stress tolerance. Abiotic stress is a primary cause of crop loss worldwide, reducing average yields for most major crop plants by more than 50% (Wang et al., Planta 218, 1-14, 2003). Abiotic stresses may be caused by drought, salinity, extremes of temperature, chemical toxicity and oxidative stress. The ability to improve plant tolerance to abiotic stress would be of great economic advantage to farmers worldwide and would allow for the cultivation of crops during adverse conditions and in territories where cultivation of crops may not otherwise be possible.

[0007] Crop yield may therefore be increased by optimising one of the above-mentioned factors.

[0008] Depending on the end use, the modification of certain yield traits may be favoured over others. For example for applications such as forage or wood production, or bio-fuel resource, an increase in the vegetative parts of a plant may be desirable, and for applications such as flour, starch or oil production, an increase in seed parameters may be particularly desirable. Even amongst the seed parameters, some may be favoured over others, depending on the application. Various mechanisms may contribute to increasing seed yield, whether that is in the form of increased seed size or increased seed number.

[0009] It has now been found that various yield-related traits may be improved in plants by modulating expression in a plant of a nucleic acid encoding an ELM2-related polypeptide, or a WRKY-related polypeptide, or an EMG1-like polypeptide, or a GPx-related polypeptide, in a plant.

[0010] With respect to ELM2-related polypeptides, the ELM2 (Egl-27 and MTA1 homology 2) domain is a small domain. It is found in the MTA1 protein that is part of the NuRD complex. The domain is usually found to the N-terminus of a myb-like DNA binding domain pfam00249. ELM2 is also found associated with an ARID (AT rich interactive domain) DNA binding domain pfam01388 in a protein from Arabidopsis thaliana. This suggests that ELM2 may also be involved in DNA binding, or perhaps is a protein-protein interaction domain. According to Ding et al. (Mol. Cell Biol. 2003 January; 23(1):250-8), the ELM2 domain functions as a transcriptional repression domain through recruitment of a trichostatin A-sensitive histone deacetylase 1 (HDAC1).

[0011] With respect to WRKY-related polypeptides, however, nothing is reported on modification of yield-related traits in plants with regard to WRKY-related polypeptide until the present day. Rushton, 2010 reports on WRKY proteins playing roles in repression and de-repression of important plant processes. Furthermore, it is described that a single WRKY-related polypeptide might be involved in regulating several seemingly disparate processes. Mechanisms of signalling and transcriptional regulation are being dissected, uncovering WRKY protein functions via interactions with a diverse array of protein partners, including MAP kinases, MAP kinase kinases, 14-3-3 proteins, calmodulin, histone deacetylases, resistance proteins and other WRKY-related polypeptides. WRKY genes exhibit extensive autoregulation and cross-regulation that facilitates transcriptional reprogramming in a dynamic web with built-in redundancy.

[0012] Van der Ent, 2009 reports on Pseudomonas fluorescens WCS417r bacteria and β-aminobutyric acid which can induce disease resistance in Arabidopsis and is based on priming of defence. Particularly, the differences and similarities of WCS417r- and β-aminobutyric acid-induced priming has been examined, wherein both WCS417r and β-aminobutyric acid prime for enhanced deposition of callose-rich papillae after infection by the oomycete Hyaloperonospora arabidopsis. This priming is regulated by convergent pathways, which depend on phosphoinositide and ABA-dependent signalling components. Conversely, induced resistance by WCS417r and β-aminobutyric acid against the bacterial pathogen Pseudomonas syringae are controlled by distinct NPR1-dependent signalling pathways. As WCS417r and β-amino butyric acid prime jasmonate- and salicylate-inducible genes, respectively, they subsequently investigated the role of transcription factors. A quantitative PCR-based genome-wide screen for putative WCS417r- and β-aminobutyric acid-responsive transcription factor genes revealed distinct sets of priming-responsive genes. Transcriptional analysis of a selection of these genes showed that they can serve as specific markers for priming. Promoter analysis of WRKY genes identified a putative cis-element that is strongly over-represented in promoters of 21 NPR1-dependent, β-aminobutyric acid-inducible WRKY genes. It is shown that priming of defence is regulated by different pathways, depending on the inducing agent and the challenging pathogen. Furthermore, it is demonstrated that priming is associated with the enhanced expression of transcription factors.

[0013] With respect to EMG1-like proteins, ribosome biogenesis is a complex stepwise process that begins with the transcription of ribosomal RNA (rRNA) and continues with a coordinated processing pathway by which the rRNA is processed and ribosomal proteins are assembled. Ribosomal RNA processing and ribosome assembly require several non-ribosomal protein factors, as well as small nucleolar RNA (snoRNA) molecules. These factors not only guide cleavage steps, but also carry out site-specific rRNA modifications that include methylation and pseudouridylation.

[0014] Nucleolar essential protein 1 (Nep1) is a highly conserved protein required for ribosome biogenesis and found in organisms from archaea to humans. Nep1 has also been designated the name Emg1 for essential for mitotic growth 1. An Emg1 gene identified in Arabidopsis thaliana, the At3g57000 gene, is described to be a member of a family of genes which are essential for 40S ribosomal biogenesis. They play a role in the methylation reaction of pre-rRNA processing. The structure of EMG1 has revealed that it is a novel member of the superfamily of alpha/beta knot fold methyltransferases.

[0015] With respect to GPx-related polypeptides, however, nothing is reported on modification of yield-related traits in plants with regard to GPx-related polypeptide until the present day. GPx encodes glutathione peroxidase and belongs to the large family of Peroxidase (Px) enzymes. Green plants contain thousands of Px proteins classified in multiple classes. GPx belong to the class of Thiol peroxidase Selenium-dependent enzyme containing GPx and Peroxiredoxin proteins.

[0016] GPx are present across kingdom with hundreds of members identified in plants and animals so far. A role of GPx in alleviating oxidative stress generated from polyunsaturated fatty acid metabolism in breast cancer cells has been revealed recently (Margis, 2008). GPx could act as homo-multimers or homo-monomers and are known to have distinct subcellular localization (cytosolic, nuclear, mitochondrial or membrane-bound). Interestingly, plant GPx could be grouped into 5 distinct clusters clearly separated according to their predicted subcellular localization suggesting existence of multiple duplication events during the evolution of GPx in different plant cellular compartment.

[0017] Margis, 2008, reports on an evolutionary overview of Glutathione peroxidase family. Particularly, Glutathione peroxidases (EC 1.11.1.9 and EC 1.11.1.12) catalyze the reduction of H₂O₂ or organic hydroperoxides to water or corresponding alcohols using reduced glutathione. Some glutathione peroxidase isozymes have a selenium-dependent glutathione peroxidase activity and present a selenocysteine encoded by the opal TGA codon. In the study of Margis, insights into the evolution of the whole glutathione peroxidase gene family were obtained after a comprehensive phylogenetic analysis using the improved number of glutathione peroxidase sequences recorded in known PeroxiBase database. The identification of a common ancestral origin for the diverse glutathione peroxidase clusters was not possible. The complex relationships and evolutionary rates of this gene family suggest that basal glutathione peroxidase classes, present in all kingdoms, have originated from independent evolutionary events such as gene duplication, gene losses, lateral gene transfer among invertebrates and vertebrates or plants. In addition, the present study also emphasizes the possibility of some members being submitted to strong selective forces that probably dictated functional convergences of taxonomically distant groups.

### DEFINITIONS

[0018] The following definitions will be used throughout the present application. The section captions and headings in this application are for convenience and reference purpose only and should not affect in any way the meaning or interpretation of this application. The technical terms and expressions used within the scope of this application are generally to be given the meaning commonly applied to them in the pertinent art of plant biology, molecular biology, bioinformatics and plant breeding. All of the following term definitions apply to the complete content of this application. The term “essentially”, “about”, “approximately” and the like in connection with an attribute or a value, particularly also define exactly the attribute or exactly the value, respectively. The term “about” in the context of a given numeric value or range relates in particular to a value or range that is within 20%, within 10%, or within 5% of the value or range given. As used herein, the term “comprising” also encompasses the term “consisting of”.

### Peptide(s)/Protein(s)

[0019] The terms “peptides”, “oligopeptides”, “polypeptide” and “protein” are used interchangeably herein and refer to amino acids in a polymeric form of any length, linked together by peptide bonds, unless mentioned herein otherwise.

### Polynucleotide(s)/Nucleic Acid(s)/Nucleic Acid Sequence(s)/Nucleotide Sequence(s)

[0020] The terms “polynucleotide(s)”, “nucleic acid sequence(s)”, “nucleotide sequence(s)”, “nucleic acid(s)”, “nucleic acid molecule” are used interchangeably herein and refer to nucleotides, either ribonucleotides or deoxyribonucleotides or a combination of both, in a polymeric unbranched form of any length.

### Homologue(s)

[0021] “Homologues” of a protein encompass peptides, oligopeptides, polypeptides, proteins and enzymes having amino acid substitutions, deletions and/or insertions relative to the unmodified protein in question and having similar biological and functional activity as the unmodified protein from which they are derived.

[0022] Orthologues and paralogues are two different forms of homologues and encompass evolutionary concepts used to describe the ancestral relationships of genes. Paralogues are genes within the same species that have originated through duplication of an ancestral gene; orthologues are genes from different organisms that have originated through speciation, and are also derived from a common ancestral gene.

[0023] A “deletion” refers to removal of one or more amino acids from a protein.

[0024] An “insertion” refers to one or more amino acid residues being introduced into a predetermined site in a protein. Insertions may comprise N-terminal and/or C-terminal fusions as well as intra-sequence insertions of single or multiple amino acids. Generally, insertions within the amino acid sequence will be smaller than N- or C-terminal fusions, of the order of about 1 to 10 residues. Examples of N- or C-terminal fusion proteins or peptides include the binding domain or activation domain of a transcriptional activator as used in the yeast two-hybrid system, phage coat proteins, (histidine)-6-tag, glutathione S-transferase-tag, protein A, maltose-binding protein, dihydrofolate reductase, Tag·100 epitope, c-myc epitope, FLAG®-epitope, lacZ, CMP (calmodulin-binding peptide), HA epitope, protein C epitope and VSV epitope.

[0025] A “substitution” refers to replacement of amino acids of the protein with other amino acids having similar properties (such as similar hydrophobicity, hydrophilicity, antigenicity, propensity to form or break α-helical structures or β-sheet structures). Amino acid substitutions are typically of single residues, but may be clustered depending upon functional constraints placed upon the polypeptide and may range from 1 to 10 amino acids. The amino acid substitutions are preferably conservative amino acid substitutions. Conservative substitution tables are well known in the art (see for example Creighton (1984) Proteins. W.H. Freeman and Company (Eds) and Table 1 below).

TABLE 1
Examples of conserved amino acid substitutions

| | Conservative | | Conservative |
|---|---|---|---|
| Residue | Substitutions | Residue | Substitutions |
| Ala | Ser | Leu | Ile; Val |
| Arg | Lys | Lys | Arg; Gln |
| Asn | Gln; His | Met | Leu; Ile |
| Asp | Glu | Phe | Met; Leu; Tyr |
| Gln | Asn | Ser | Thr; Gly |
| Cys | Ser | Thr | Ser; Val |
| Glu | Asp | Trp | Tyr |
| Gly | Pro | Tyr | Trp; Phe |
| His | Asn; Gln | Val | Ile; Leu |
| Ile | Leu, Val | | |

[0026] Amino acid substitutions, deletions and/or insertions may readily be made using peptide synthetic techniques known in the art, such as solid phase peptide synthesis and the like, or by recombinant DNA manipulation. Methods for the manipulation of DNA sequences to produce substitution, insertion or deletion variants of a protein are well known in the art. For example, techniques for making substitution mutations at predetermined sites in DNA are well known to those skilled in the art and include M13 mutagenesis, T7-Gen in vitro mutagenesis (USB, Cleveland, Ohio), QuickChange Site Directed mutagenesis (Stratagene, San Diego, Calif.), PCR-mediated site-directed mutagenesis or other site-directed mutagenesis protocols (see Current Protocols in Molecular Biology, John Wiley & Sons, N.Y. (1989 and yearly updates)).

### Derivatives

[0027] “Derivatives” include peptides, oligopeptides, polypeptides which may, compared to the amino acid sequence of the naturally-occurring form of the protein, such as the protein of interest, comprise substitutions of amino acids with non-naturally occurring amino acid residues, or additions of non-naturally occurring amino acid residues. “Derivatives” of a protein also encompass peptides, oligopeptides, polypeptides which comprise naturally occurring altered (glycosylated, acylated, prenylated, phosphorylated, myristoylated, sulphated etc.) or non-naturally altered amino acid residues compared to the amino acid sequence of a naturally-occurring form of the polypeptide. A derivative may also comprise one or more non-amino acid substituents or additions compared to the amino acid sequence from which it is derived, for example a reporter molecule or other ligand, covalently or non-covalently bound to the amino acid sequence, such as a reporter molecule which is bound to facilitate its detection, and non-naturally occurring amino acid residues relative to the amino acid sequence of a naturally-occurring protein. Furthermore, “derivatives” also include fusions of the naturally-occurring form of the protein with tagging peptides such as FLAG, HIS6 or thioredoxin (for a review of tagging peptides, see Terpe, Appl. Microbiol. Biotechnol. 60, 523-533, 2003).

### Domain, Motif/Consensus Sequence/Signature

[0028] The term “domain” refers to a set of amino acids conserved at specific positions along an alignment of sequences of evolutionarily related proteins. While amino acids at other positions can vary between homologues, amino acids that are highly conserved at specific positions indicate amino acids that are likely essential in the structure, stability or function of a protein. Identified by their high degree of conservation in aligned sequences of a family of protein homologues, they can be used as identifiers to determine if any polypeptide in question belongs to a previously identified polypeptide family.

[0029] The term “motif” or “consensus sequence” or “signature” refers to a short conserved region in the sequence of evolutionarily related proteins. Motifs are frequently highly conserved parts of domains, but may also include only part of the domain, or be located outside of conserved domain (if all of the amino acids of the motif fall outside of a defined domain).

[0030] Specialist databases exist for the identification of domains, for example, SMART (Schultz et al. (1998) Proc. Natl. Acad. Sci. USA 95, 5857-5864; Letunic et al. (2002) Nucleic Acids Res 30, 242-244), InterPro (Mulder et al., (2003) Nucl. Acids. Res. 31, 315-318), Prosite (Bucher and Bairoch (1994), A generalized profile syntax for biomolecular sequences motifs and its function in automatic sequence interpretation. (In) ISMB-94; Proceedings 2nd International Conference on Intelligent Systems for Molecular Biology. Altman R., Brutlag D., Karp P., Lathrop R., Searls D., Eds., pp 53-61, AAAI Press, Menlo Park; Hulo et al., Nucl. Acids. Res. 32:D134-D137, (2004)), or Pfam (Bateman et al., Nucleic Acids Research 30(1): 276-280 (2002)). The Pfam protein families database: R. D. Finn, J. Mistry, J. Tate, P. Coggill, A. Heger, J. E. Pollington, O. L. Gavin, P. Gunesekaran, G. Ceric, K. Forslund, L. Holm, E. L. Sonnhammer, S. R. Eddy, A. Bateman Nucleic Acids Research (2010) Database Issue 38: 211-222). A set of tools for in silico analysis of protein sequences is available on the ExPASy proteomics server (Swiss Institute of Bioinformatics (Gasteiger et al., ExPASy: the proteomics server for in-depth protein knowledge and analysis, Nucleic Acids Res. 31:3784-3788(2003)). Domains or motifs may also be identified using routine techniques, such as by sequence alignment.

[0031] Methods for the alignment of sequences for comparison are well known in the art, such methods include GAP, BESTFIT, BLAST, FASTA and TFASTA. GAP uses the algorithm of Needleman and Wunsch ((1970) J Mol Biol 48: 443-453) to find the global (i.e. spanning the complete sequences) alignment of two sequences that maximizes the number of matches and minimizes the number of gaps. The BLAST algorithm (Altschul et al. (1990) J Mol Biol 215: 403-10) calculates percent sequence identity and performs a statistical analysis of the similarity between the two sequences. The software for performing BLAST analysis is publicly available through the National Centre for Biotechnology Information (NCBI). Homologues may readily be identified using, for example, the ClustalW multiple sequence alignment algorithm (version 1.83), with the default pairwise alignment parameters, and a scoring method in percentage. Global percentages of similarity and identity may also be determined using one of the methods available in the MatGAT software package (Campanella et al., BMC Bioinformatics. 2003 Jul. 10; 4:29. MatGAT: an application that generates similarity/identity matrices using protein or DNA sequences.). Minor manual editing may be performed to optimise alignment between conserved motifs, as would be apparent to a person skilled in the art. Furthermore, instead of using full-length sequences for the identification of homologues, specific domains may also be used. The sequence identity values may be determined over the entire nucleic acid or amino acid sequence or over selected domains or conserved motif(s), using the programs mentioned above using the default parameters. For local alignments, the Smith-Waterman algorithm is particularly useful (Smith T F, Waterman M S (1981) J. Mol. Biol 147(1); 195-7).

### Reciprocal BLAST

[0032] Typically, this involves a first BLAST involving BLASTing a query sequence (for example using any of the sequences listed in Table A of the Examples section) against any sequence database, such as the publicly available NCBI database. BLASTN or TBLASTX (using standard default values) are generally used when starting from a nucleotide sequence, and BLASTP or TBLASTN (using standard default values) when starting from a protein sequence. The BLAST results may optionally be filtered. The full-length sequences of either the filtered results or non-filtered results are then BLASTed back (second BLAST) against sequences from the organism from which the query sequence is derived. The results of the first and second BLASTs are then compared. A paralogue is identified if a high-ranking hit from the first blast is from the same species as from which the query sequence is derived, a BLAST back then ideally results in the query sequence amongst the highest hits; an orthologue is identified if a high-ranking hit in the first BLAST is not from the same species as from which the query sequence is derived, and preferably results upon BLAST back in the query sequence being among the highest hits.

[0033] High-ranking hits are those having a low E-value. The lower the E-value, the more significant the score (or in other words the lower the chance that the hit was found by chance). Computation of the E-value is well known in the art. In addition to E-values, comparisons are also scored by percentage identity. Percentage identity refers to the number of identical nucleotides (or amino acids) between the two compared nucleic acid (or polypeptide) sequences over a particular length. In the case of large families, ClustalW may be used, followed by a neighbour joining tree, to help visualize clustering of related genes and to identify orthologues and paralogues.

### Hybridisation

[0034] The term “hybridisation” as defined herein is a process wherein substantially homologous complementary nucleotide sequences anneal to each other. The hybridisation process can occur entirely in solution, i.e. both complementary nucleic acids are in solution. The hybridisation process can also occur with one of the complementary nucleic acids immobilised to a matrix such as magnetic beads, Sepharose beads or any other resin. The hybridisation process can furthermore occur with one of the complementary nucleic acids immobilised to a solid support such as a nitro-cellulose or nylon membrane or immobilised by e.g. photolithography to, for example, a siliceous glass support (the latter known as nucleic acid arrays or microarrays or as nucleic acid chips). In order to allow hybridisation to occur, the nucleic acid molecules are generally thermally or chemically denatured to melt a double strand into two single strands and/or to remove hairpins or other secondary structures from single stranded nucleic acids.

[0035] The term “stringency” refers to the conditions under which a hybridisation takes place. The stringency of hybridisation is influenced by conditions such as temperature, salt concentration, ionic strength and hybridisation buffer composition. Generally, low stringency conditions are selected to be about 30° C. lower than the thermal melting point (Tₘ) for the specific sequence at a defined ionic strength and pH. Medium stringency conditions are when the temperature is 20° C. below Tₘ, and high stringency conditions are when the temperature is 10° C. below Tₘ. High stringency hybridisation conditions are typically used for isolating hybridising sequences that have high sequence similarity to the target nucleic acid sequence. However, nucleic acids may deviate in sequence and still encode a substantially identical polypeptide, due to the degeneracy of the genetic code. Therefore medium stringency hybridisation conditions may sometimes be needed to identify such nucleic acid molecules.

[0036] The Tₘ is the temperature under defined ionic strength and pH, at which 50% of the target sequence hybridises to a perfectly matched probe. The Tₘ is dependent upon the solution conditions and the base composition and length of the probe. For example, longer sequences hybridise specifically at higher temperatures. The maximum rate of hybridisation is obtained from about 16° C. up to 32° C. below Tₘ. The presence of monovalent cations in the hybridisation solution reduce the electrostatic repulsion between the two nucleic acid strands thereby promoting hybrid formation; this effect is visible for sodium concentrations of up to 0.4M (for higher concentrations, this effect may be ignored). Formamide reduces the melting temperature of DNA-DNA and DNA-RNA duplexes with 0.6 to 0.7° C. for each percent formamide, and addition of 50% formamide allows hybridisation to be performed at 30 to 45° C., though the rate of hybridisation will be lowered. Base pair mismatches reduce the hybridisation rate and the thermal stability of the duplexes. On average and for large probes, the Tm decreases about 1° C. per % base mismatch. The Tₘ may be calculated using the following equations, depending on the types of hybrids:
[0037] 1) DNA-DNA hybrids (Meinkoth and Wahl, Anal. Biochem., 138: 267-284, 1984):

Tₘ=81.5° C.+16.6×log₁₀[Na⁺]^{a}+0.41×%[G/C^{b}]−500×[L^{c}]⁻¹−0.61×% formamide
[0038] 2) DNA-RNA or RNA-RNA hybrids:

Tₘ=79.8° C.+18.5(log₁₀[Na⁺]^{a})+0.58(% G/C^{b})+11.8(% G/C^{b})²−820/L^{c}
[0039] 3) oligo-DNA or oligo-RNA^{d} hybrids:

[0040] For <20 nucleotides: Tₘ=2 (Iₙ)

[0041] For 20-35 nucleotides: Tₘ=22+1.46 (Iₙ)
[0042] ^{a} or for other monovalent cation, but only accurate in the 0.01-0.4 M range.
[0043] ^{b} only accurate for % GC in the 30% to 75% range.
[0044] ^{c} L=length of duplex in base pairs.
[0045] ^{d} oligo, oligonucleotide; Iₙ, =effective length of primer=2×(no. of G/C)+(no. of A/T).

[0046] Non-specific binding may be controlled using any one of a number of known techniques such as, for example, blocking the membrane with protein containing solutions, additions of heterologous RNA, DNA, and SDS to the hybridisation buffer, and treatment with Rnase. For non-homologous probes, a series of hybridizations may be performed by varying one of (i) progressively lowering the annealing temperature (for example from 68° C. to 42° C.) or (ii) progressively lowering the formamide concentration (for example from 50% to 0%). The skilled artisan is aware of various parameters which may be altered during hybridisation and which will either maintain or change the stringency conditions.

[0047] Besides the hybridisation conditions, specificity of hybridisation typically also depends on the function of post-hybridisation washes. To remove background resulting from non-specific hybridisation, samples are washed with dilute salt solutions. Critical factors of such washes include the ionic strength and temperature of the final wash solution: the lower the salt concentration and the higher the wash temperature, the higher the stringency of the wash. Wash conditions are typically performed at or below hybridisation stringency. A positive hybridisation gives a signal that is at least twice of that of the background.

[0048] Generally, suitable stringent conditions for nucleic acid hybridisation assays or gene amplification detection procedures are as set forth above. More or less stringent conditions may also be selected. The skilled artisan is aware of various parameters which may be altered during washing and which will either maintain or change the stringency conditions.

[0049] For example, typical high stringency hybridisation conditions for DNA hybrids longer than 50 nucleotides encompass hybridisation at 65° C. in 1×SSC or at 42° C. in 1×SSC and 50% formamide, followed by washing at 65° C. in 0.3×SSC. Examples of medium stringency hybridisation conditions for DNA hybrids longer than 50 nucleotides encompass hybridisation at 50° C. in 4×SSC or at 40° C. in 6×SSC and 50% formamide, followed by washing at 50° C. in 2×SSC. The length of the hybrid is the anticipated length for the hybridising nucleic acid. When nucleic acids of known sequence are hybridised, the hybrid length may be determined by aligning the sequences and identifying the conserved regions described herein. 1×SSC is 0.15M NaCl and 15 mM sodium citrate; the hybridisation solution and wash solutions may additionally include 5×Denhardt's reagent, 0.5-1.0% SDS, 100 μg/ml denatured, fragmented salmon sperm DNA, 0.5% sodium pyrophosphate.

[0050] For the purposes of defining the level of stringency, reference can be made to Sambrook et al. (2001) Molecular Cloning: a laboratory manual, 3^{rd} Edition, Cold Spring Harbor Laboratory Press, CSH, New York or to Current Protocols in Molecular Biology, John Wiley & Sons, N.Y. (1989 and yearly updates).

### Splice Variant

[0051] The term “splice variant” as used herein encompasses variants of a nucleic acid sequence in which selected introns and/or exons have been excised, replaced, displaced or added, or in which introns have been shortened or lengthened. Such variants will be ones in which the biological activity of the protein is substantially retained; this may be achieved by selectively retaining functional segments of the protein. Such splice variants may be found in nature or may be manmade. Methods for predicting and isolating such splice variants are well known in the art (see for example Foissac and Schiex (2005) BMC Bioinformatics 6: 25).

### Allelic Variant

[0052] “Alleles” or “allelic variants” are alternative forms of a given gene, located at the same chromosomal position. Allelic variants encompass Single Nucleotide Polymorphisms (SNPs), as well as Small Insertion/Deletion Polymorphisms (INDELs). The size of INDELs is usually less than 100 bp. SNPs and INDELs form the largest set of sequence variants in naturally occurring polymorphic strains of most organisms.

### Endogenous Gene

[0053] Reference herein to an “endogenous” gene not only refers to the gene in question as found in a plant in its natural form (i.e., without there being any human intervention), but also refers to that same gene (or a substantially homologous nucleic acid/gene) in an isolated form subsequently (re)introduced into a plant (a transgene). For example, a transgenic plant containing such a transgene may encounter a substantial reduction of the transgene expression and/or substantial reduction of expression of the endogenous gene. The isolated gene may be isolated from an organism or may be manmade, for example by chemical synthesis.

### Gene Shuffling/Directed Evolution

[0054] “Gene shuffling” or “directed evolution” consists of iterations of DNA shuffling followed by appropriate screening and/or selection to generate variants of nucleic acids or portions thereof encoding proteins having a modified biological activity (Castle et al., (2004) Science 304(5674): 1151-4; U.S. Pat. Nos. 5,811,238 and 6,395,547).

### Construct

[0055] Artificial DNA (such as but, not limited to plasmids or viral DNA) capable of replication in a host cell and used for introduction of a DNA sequence of interest into a host cell or host organism. Host cells of the invention may be any cell selected from bacterial cells, such as Escherichia coli or Agrobacterium species cells, yeast cells, fungal, algal or cyanobacterial cells or plant cells. The skilled artisan is well aware of the genetic elements that must be present on the genetic construct in order to successfully transform, select and propagate host cells containing the sequence of interest. The sequence of interest is operably linked to one or more control sequences (at least to a promoter) as described herein. Additional regulatory elements may include transcriptional as well as translational enhancers. Those skilled in the art will be aware of terminator and enhancer sequences that may be suitable for use in performing the invention. An intron sequence may also be added to the 5′ untranslated region (UTR) or in the coding sequence to increase the amount of the mature message that accumulates in the cytosol, as described in the definitions section. Other control sequences (besides promoter, enhancer, silencer, intron sequences, 3′UTR and/or 5′UTR regions) may be protein and/or RNA stabilizing elements. Such sequences would be known or may readily be obtained by a person skilled in the art.

[0056] The genetic constructs of the invention may further include an origin of replication sequence that is required for maintenance and/or replication in a specific cell type. One example is when a genetic construct is required to be maintained in a bacterial cell as an episomal genetic element (e.g. plasmid or cosmid molecule). Preferred origins of replication include, but are not limited to, the f1-ori and colE1.

[0057] For the detection of the successful transfer of the nucleic acid sequences as used in the methods of the invention and/or selection of transgenic plants comprising these nucleic acids, it is advantageous to use marker genes (or reporter genes). Therefore, the genetic construct may optionally comprise a selectable marker gene. Selectable markers are described in more detail in the “definitions” section herein. The marker genes may be removed or excised from the transgenic cell once they are no longer needed. Techniques for marker removal are known in the art, useful techniques are described above in the definitions section.

### Regulatory Element/Control Sequence/Promoter

[0058] The terms “regulatory element”, “control sequence” and “promoter” are all used interchangeably herein and are to be taken in a broad context to refer to regulatory nucleic acid sequences capable of effecting expression of the sequences to which they are ligated. The term “promoter” typically refers to a nucleic acid control sequence located upstream from the transcriptional start of a gene and which is involved in recognising and binding of RNA polymerase and other proteins, thereby directing transcription of an operably linked nucleic acid. Encompassed by the aforementioned terms are transcriptional regulatory sequences derived from a classical eukaryotic genomic gene (including the TATA box which is required for accurate transcription initiation, with or without a CCAAT box sequence) and additional regulatory elements (i.e. upstream activating sequences, enhancers and silencers) which alter gene expression in response to developmental and/or external stimuli, or in a tissue-specific manner. Also included within the term is a transcriptional regulatory sequence of a classical prokaryotic gene, in which case it may include a −35 box sequence and/or −10 box transcriptional regulatory sequences. The term “regulatory element” also encompasses a synthetic fusion molecule or derivative that confers, activates or enhances expression of a nucleic acid molecule in a cell, tissue or organ.

[0059] A “plant promoter” comprises regulatory elements, which mediate the expression of a coding sequence segment in plant cells. Accordingly, a plant promoter need not be of plant origin, but may originate from viruses or micro-organisms, for example from viruses which attack plant cells. The “plant promoter” can also originate from a plant cell, e.g. from the plant which is transformed with the nucleic acid sequence to be expressed in the inventive process and described herein. This also applies to other “plant” regulatory signals, such as “plant” terminators. The promoters upstream of the nucleotide sequences useful in the methods of the present invention can be modified by one or more nucleotide substitution(s), insertion(s) and/or deletion(s) without interfering with the functionality or activity of either the promoters, the open reading frame (ORF) or the 3′-regulatory region such as terminators or other 3′ regulatory regions which are located away from the ORF. It is furthermore possible that the activity of the promoters is increased by modification of their sequence, or that they are replaced completely by more active promoters, even promoters from heterologous organisms. For expression in plants, the nucleic acid molecule must, as described above, be linked operably to or comprise a suitable promoter which expresses the gene at the right point in time and with the required spatial expression pattern.

[0060] For the identification of functionally equivalent promoters, the promoter strength and/or expression pattern of a candidate promoter may be analysed for example by operably linking the promoter to a reporter gene and assaying the expression level and pattern of the reporter gene in various tissues of the plant. Suitable well-known reporter genes include for example beta-glucuronidase or beta-galactosidase. The promoter activity is assayed by measuring the enzymatic activity of the beta-glucuronidase or beta-galactosidase. The promoter strength and/or expression pattern may then be compared to that of a reference promoter (such as the one used in the methods of the present invention). Alternatively, promoter strength may be assayed by quantifying mRNA levels or by comparing mRNA levels of the nucleic acid used in the methods of the present invention, with mRNA levels of housekeeping genes such as 18S rRNA, using methods known in the art, such as Northern blotting with densitometric analysis of autoradiograms, quantitative real-time PCR or RT-PCR (Heid et al., 1996 Genome Methods 6: 986-994). Generally by “weak promoter” is intended a promoter that drives expression of a coding sequence at a low level. By “low level” is intended at levels of about 1/10,000 transcripts to about 1/100,000 transcripts, to about 1/500,0000 transcripts per cell. Conversely, a “strong promoter” drives expression of a coding sequence at high level, or at about 1/10 transcripts to about 1/100 transcripts to about 1/1000 transcripts per cell. Generally, by “medium strength promoter” is intended a promoter that drives expression of a coding sequence at a lower level than a strong promoter, in particular at a level that is in all instances below that obtained when under the control of a 35S CaMV promoter.

### Operably Linked

[0061] The term “operably linked” as used herein refers to a functional linkage between the promoter sequence and the gene of interest, such that the promoter sequence is able to initiate transcription of the gene of interest.

### Constitutive Promoter

[0062] A “constitutive promoter” refers to a promoter that is transcriptionally active during most, but not necessarily all, phases of growth and development and under most environmental conditions, in at least one cell, tissue or organ. Table 2a below gives examples of constitutive promoters.

TABLE 2a
Examples of constitutive promoters

| Gene Source | Reference |
|---|---|
| Actin | McElroy et al, Plant Cell, 2: 163-171, 1990 |
| HMGP | WO 2004/070039 |
| CAMV 35S | Odell et al, Nature, 313: 810-812, 1985 |
| CaMV 19S | Nilsson et al., Physiol. Plant. 100: 456-462, 1997 |
| GOS2 | de Pater et al, Plant J Nov; 2(6): 837-44, 1992, |
| | WO 2004/065596 |
| Ubiquitin | Christensen et al, Plant Mol. Biol. 18: 675-689, |
| | 1992 |
| Rice cyclophilin | Buchholz et al, Plant Mol Biol. 25(5): 837-43, 1994 |
| Maize H3 histone | Lepetit et al, Mol. Gen. Genet. 231: 276-285, 1992 |
| Alfalfa H3 histone | Wu et al. Plant Mol. Biol. 11: 641-649, 1988 |
| Actin 2 | An et al, Plant J. 10(1); 107-121, 1996 |
| 34S FMV | Sanger et al., Plant. Mol. Biol., 14, 1990: 433-443 |
| Rubisco small | U.S. Pat. No. 4,962,028 |
| subunit | |
| OCS | Leisner (1988) Proc Natl Acad Sci USA 85(5): 2553 |
| SAD1 | Jain et al., Crop Science, 39 (6), 1999: 1696 |
| SAD2 | Jain et al., Crop Science, 39 (6), 1999: 1696 |
| nos | Shaw et al. (1984) Nucleic Acids Res. 12(20): |
| | 7831-7846 |
| V-ATPase | WO 01/14572 |
| Super promoter | WO 95/14098 |
| G-box proteins | WO 94/12015 |

### Ubiquitous Promoter

[0063] A “ubiquitous promoter” is active in substantially all tissues or cells of an organism.

### Developmentally-Regulated Promoter

[0064] A “developmentally-regulated promoter” is active during certain developmental stages or in parts of the plant that undergo developmental changes.

### Inducible Promoter

[0065] An “inducible promoter” has induced or increased transcription initiation in response to a chemical (for a review see Gatz 1997, Annu. Rev. Plant Physiol. Plant Mol. Biol., 48:89-108), environmental or physical stimulus, or may be “stress-inducible”, i.e. activated when a plant is exposed to various stress conditions, or a “pathogen-inducible” i.e. activated when a plant is exposed to exposure to various pathogens.

### Organ-Specific/Tissue-Specific Promoter

[0066] An “organ-specific” or “tissue-specific promoter” is one that is capable of preferentially initiating transcription in certain organs or tissues, such as the leaves, roots, seed tissue etc. For example, a “root-specific promoter” is a promoter that is transcriptionally active predominantly in plant roots, substantially to the exclusion of any other parts of a plant, whilst still allowing for any leaky expression in these other plant parts. Promoters able to initiate transcription in certain cells only are referred to herein as “cell-specific”.

[0067] Examples of root-specific promoters are listed in Table 2b below:

TABLE 2b
Examples of root-specific promoters

| Gene Source | Reference |
|---|---|
| RCc3 | Plant Mol Biol. 1995 Jan; 27(2): 237-48 |
| Arabidopsis PHT1 | Koyama et al. J Biosci Bioeng. 2005 Jan; 99(1): 38-42.; Mudge et |
| | al. (2002, Plant J. 31: 341) |
| Medicago phosphate | Xiao et al., 2006, Plant Biol (Stuttg). 2006 Jul; 8(4): 439-49 |
| transporter | |
| Arabidopsis Pyk10 | Nitz et al. (2001) Plant Sci 161(2): 337-346 |
| root-expressible genes | Tingey et al., EMBO J. 6: 1, 1987. |
| tobacco auxin-inducible | Van der Zaal et al., Plant Mol. Biol. 16, 983, 1991. |
| gene | |
| β-tubulin | Oppenheimer, et al., Gene 63: 87, 1988. |
| tobacco root-specific | Conkling, et al., Plant Physiol. 93: 1203, 1990. |
| genes | |
| B. napus G1-3b gene | U.S. Pat. No. 5,401,836 |
| SbPRP1 | Suzuki et al., Plant Mol. Biol. 21: 109-119, 1993. |
| LRX1 | Baumberger et al. 2001, Genes & Dev. 15: 1128 |
| BTG-26 Brassica napus | US 20050044585 |
| LeAMT1 (tomato) | Lauter et al. (1996, PNAS 3: 8139) |
| The LeNRT1-1 (tomato) | Lauter et al. (1996, PNAS 3: 8139) |
| class I patatin gene | Liu et al., Plant Mol. Biol. 17 (6): 1139-1154 |
| (potato) | |
| KDC1 (Daucus carota) | Downey et al. (2000, J. Biol. Chem. 275: 39420) |
| TobRB7 gene | W Song (1997) PhD Thesis, North Carolina State University, |
| | Raleigh, NC USA |
| OsRAB5a (rice) | Wang et al. 2002, Plant Sci. 163: 273 |
| ALF5 (Arabidopsis) | Diener et al. (2001, Plant Cell 13: 1625) |
| NRT2; 1Np (N. plumbaginifolia) | Quesada et al. (1997, Plant Mol. Biol. 34: 265) |

[0068] A “seed-specific promoter” is transcriptionally active predominantly in seed tissue, but not necessarily exclusively in seed tissue (in cases of leaky expression). The seed-specific promoter may be active during seed development and/or during germination. The seed specific promoter may be endosperm/aleurone/embryo specific. Examples of seed-specific promoters (endosperm/aleurone/embryo specific) are shown in Table 2c to Table 2f below. Further examples of seed-specific promoters are given in Qing Qu and Takaiwa (Plant Biotechnol. J. 2, 113-125, 2004), which disclosure is incorporated by reference herein as if fully set forth.

TABLE 2c
Examples of seed-specific promoters

| Gene source | Reference |
|---|---|
| seed-specific genes | Simon et al., Plant Mol. Biol. 5: 191, 1985; |
| | Scofield et al., J. Biol. Chem. 262: 12202, 1987.; |
| | Baszczynski et al., Plant Mol. Biol. 14: 633, 1990. |
| Brazil Nut albumin | Pearson et al., Plant Mol. Biol. 18: 235-245, 1992. |
| legumin | Ellis et al., Plant Mol. Biol. 10: 203-214, 1988. |
| glutelin (rice) | Takaiwa et al., Mol. Gen. Genet. 208: 15-22, 1986; |
| | Takaiwa et al., FEBS Letts. 221: 43-47, 1987. |
| zein | Matzke et al Plant Mol Biol, 14(3): 323-32 1990 |
| napA | Stalberg et al, Planta 199: 515-519, 1996. |
| wheat LMW and HMW | Mol Gen Genet 216: 81-90, 1989; NAR 17: 461-2, 1989 |
| glutenin-1 | |
| wheat SPA | Albani et al, Plant Cell, 9: 171-184, 1997 |
| wheat α,β,γ-gliadins | EMBO J. 3: 1409-15, 1984 |
| barley ltr1 promoter | Diaz et al. (1995) Mol Gen Genet 248(5): 592-8 |
| barley B1, C, D, hordein | Theor Appl Gen 98: 1253-62, 1999; Plant J 4: 343-55, |
| | 1993; Mol Gen Genet 250: 750-60, 1996 |
| barley DOF | Mena et al, The Plant Journal, 116(1): 53-62, 1998 |
| blz2 | EP99106056.7 |
| synthetic promoter | Vicente-Carbajosa et al., Plant J. 13: 629-640, 1998. |
| rice prolamin NRP33 | Wu et al, Plant Cell Physiology 39(8) 885-889, 1998 |
| rice a-globulin Glb-1 | Wu et al, Plant Cell Physiology 39(8) 885-889, 1998 |
| rice OSH1 | Sato et al, Proc. Natl. Acad. Sci. USA, 93: 8117-8122, |
| | 1996 |
| rice α-globulin REB/OHP-1 | Nakase et al. Plant Mol. Biol. 33: 513-522, 1997 |
| rice ADP-glucose pyrophosphorylase | Trans Res 6: 157-68, 1997 |
| maize ESR gene family | Plant J 12: 235-46, 1997 |
| sorghum α-kafirin | DeRose et al., Plant Mol. Biol 32: 1029-35, 1996 |
| KNOX | Postma-Haarsma et al, Plant Mol. Biol. 39: 257-71, 1999 |
| rice oleosin | Wu et al, J. Biochem. 123: 386, 1998 |
| sunflower oleosin | Cummins et al., Plant Mol. Biol. 19: 873-876, 1992 |
| PRO0117, putative rice 40S | WO 2004/070039 |
| ribosomal protein | |
| PRO0136, rice alanine | unpublished |
| aminotransferase | |
| PRO0147, trypsin inhibitor | unpublished |
| ITR1 (barley) | |
| PRO0151, rice WSI18 | WO 2004/070039 |
| PRO0175, rice RAB21 | WO 2004/070039 |
| PRO005 | WO 2004/070039 |
| PRO0095 | WO 2004/070039 |
| α-amylase (Amy32b) | Lanahan et al, Plant Cell 4: 203-211, 1992; Skriver et al, |
| | Proc Natl Acad Sci USA 88: 7266-7270, 1991 |
| cathepsin β-like gene | Cejudo et al, Plant Mol Biol 20: 849-856, 1992 |
| Barley Ltp2 | Kalla et al., Plant J. 6: 849-60, 1994 |
| Chi26 | Leah et al., Plant J. 4: 579-89, 1994 |
| Maize B-Peru | Selinger et al., Genetics 149; 1125-38, 1998 |

TABLE 2d
examples of endosperm-specific promoters

| Gene source | Reference |
|---|---|
| glutelin (rice) | Takaiwa et al. (1986) Mol Gen Genet 208: 15-22; |
| | Takaiwa et al. (1987) FEBS Letts. 221: 43-47 |
| zein | Matzke et al., (1990) Plant Mol Biol 14(3): 323-32 |
| wheat LMW and HMW glutenin-1 | Colot et al. (1989) Mol Gen Genet 216: 81-90, |
| | Anderson et al. (1989) NAR 17: 461-2 |
| wheat SPA | Albani et al. (1997) Plant Cell 9: 171-184 |
| wheat gliadins | Rafalski et al. (1984) EMBO 3: 1409-15 |
| barley Itr1 promoter | Diaz et al. (1995) Mol Gen Genet 248(5): 592-8 |
| barley B1, C, D, hordein | Cho et al. (1999) Theor Appl Genet 98: 1253-62; |
| | Muller et al. (1993) Plant J 4: 343-55; |
| | Sorenson et al. (1996) Mol Gen Genet 250: 750-60 |
| barley DOF | Mena et al, (1998) Plant J 116(1): 53-62 |
| blz2 | Onate et al. (1999) J Biol Chem 274(14): 9175-82 |
| synthetic promoter | Vicente-Carbajosa et al. (1998) Plant J 13: 629-640 |
| rice prolamin NRP33 | Wu et al, (1998) Plant Cell Physiol 39(8) 885-889 |
| rice globulin Glb-1 | Wu et al. (1998) Plant Cell Physiol 39(8) 885-889 |
| rice globulin REB/OHP-1 | Nakase et al. (1997) Plant Molec Biol 33: 513-522 |
| rice ADP-glucose pyrophosphorylase | Russell et al. (1997) Trans Res 6: 157-68 |
| maize ESR gene family | Opsahl-Ferstad et al. (1997) Plant J 12: 235-46 |
| sorghum kafirin | DeRose et al. (1996) Plant Mol Biol 32: 1029-35 |

TABLE 2e
Examples of embryo specific promoters:

| Gene source | Reference |
|---|---|
| rice OSH1 | Sato et al, Proc. Natl. Acad. Sci. USA, 93: 8117-8122, |
| | 1996 |
| KNOX | Postma-Haarsma et al, Plant Mol. Biol. 39: 257-71, 1999 |
| PRO0151 | WO 2004/070039 |
| PRO0175 | WO 2004/070039 |
| PRO005 | WO 2004/070039 |
| PRO0095 | WO 2004/070039 |

TABLE 2f
Examples of aleurone-specific promoters:

| Gene source | Reference |
|---|---|
| α-amylase (Amy32b) | Lanahan et al, Plant Cell 4: 203-211, 1992; |
| | Skriver et al, Proc Natl Acad Sci USA 88: |
| | 7266-7270, 1991 |
| cathepsin β-like gene | Cejudo et al, Plant Mol Biol 20: 849-856, 1992 |
| Barley Ltp2 | Kalla et al., Plant J. 6: 849-60, 1994 |
| Chi26 | Leah et al., Plant J. 4: 579-89, 1994 |
| Maize B-Peru | Selinger et al., Genetics 149; 1125-38, 1998 |

[0069] A “green tissue-specific promoter” as defined herein is a promoter that is transcriptionally active predominantly in green tissue, substantially to the exclusion of any other parts of a plant, whilst still allowing for any leaky expression in these other plant parts.

[0070] Examples of green tissue-specific promoters which may be used to perform the methods of the invention are shown in Table 2g below.

TABLE 2g
Examples of green tissue-specific promoters

| Gene | Expression | Reference |
|---|---|---|
| Maize Orthophosphate dikinase | Leaf specific | Fukavama et al., Plant Physiol. |
| | | 2001 Nov; 127(3): 1136-46 |
| Maize Phosphoenolpyruvate carboxylase | Leaf specific | Kausch et al., Plant Mol Biol. |
| | | 2001 Jan; 45(1): 1-15 |
| Rice Phosphoenolpyruvate carboxylase | Leaf specific | Lin et al., 2004 DNA Seq. 2004 |
| | | Aug; 15(4): 269-76 |
| Rice small subunit Rubisco | Leaf specific | Nomura et al., Plant Mol Biol. |
| | | 2000 Sep; 44(1): 99-106 |
| rice beta expansin EXBP9 | Shoot specific | WO 2004/070039 |
| Pigeonpea small subunit Rubisco | Leaf specific | Panguluri et al., Indian J Exp |
| | | Biol. 2005 Apr; 43(4): 369-72 |
| Pea RBCS3A | Leaf specific | |

[0071] Another example of a tissue-specific promoter is a meristem-specific promoter, which is transcriptionally active predominantly in meristematic tissue, substantially to the exclusion of any other parts of a plant, whilst still allowing for any leaky expression in these other plant parts. Examples of green meristem-specific promoters which may be used to perform the methods of the invention are shown in Table 2h below.

TABLE 2h
Examples of meristem-specific promoters

| Gene source | Expression pattern | Reference |
|---|---|---|
| rice OSH1 | Shoot apical meristem, | Sato et al. (1996) |
| | from embryo globular | Proc. Natl. Acad. Sci. |
| | stage to seedling stage | USA, 93: 8117-8122 |
| Rice metallothionein | Meristem specific | BAD87835.1 |
| WAK1 & WAK 2 | Shoot and root apical | Wagner & Kohorn (2001) |
| | meristems, and in | Plant Cell 13(2): 303-318 |
| | expanding leaves and | |
| | sepals | |

### Terminator

[0072] The term “terminator” encompasses a control sequence which is a DNA sequence at the end of a transcriptional unit which signals 3′ processing and polyadenylation of a primary transcript and termination of transcription. The terminator can be derived from the natural gene, from a variety of other plant genes, or from T-DNA. The terminator to be added may be derived from, for example, the nopaline synthase or octopine synthase genes, or alternatively from another plant gene, or less preferably from any other eukaryotic gene.

### Selectable Marker (Gene)/Reporter Gene

[0073] “Selectable marker”, “selectable marker gene” or “reporter gene” includes any gene that confers a phenotype on a cell in which it is expressed to facilitate the identification and/or selection of cells that are transfected or transformed with a nucleic acid construct of the invention. These marker genes enable the identification of a successful transfer of the nucleic acid molecules via a series of different principles. Suitable markers may be selected from markers that confer antibiotic or herbicide resistance, that introduce a new metabolic trait or that allow visual selection. Examples of selectable marker genes include genes conferring resistance to antibiotics (such as nptll that phosphorylates neomycin and kanamycin, or hpt, phosphorylating hygromycin, or genes conferring resistance to, for example, bleomycin, streptomycin, tetracyclin, chloramphenicol, ampicillin, gentamycin, geneticin (G418), spectinomycin or blasticidin), to herbicides (for example bar which provides resistance to Basta®; aroA or gox providing resistance against glyphosate, or the genes conferring resistance to, for example, imidazolinone, phosphinothricin or sulfonylurea), or genes that provide a metabolic trait (such as manA that allows plants to use mannose as sole carbon source or xylose isomerase for the utilisation of xylose, or antinutritive markers such as the resistance to 2-deoxyglucose). Expression of visual marker genes results in the formation of colour (for example β-glucuronidase, GUS or β-galactosidase with its coloured substrates, for example X-Gal), luminescence (such as the luciferin/luceferase system) or fluorescence (Green Fluorescent Protein, GFP, and derivatives thereof). This list represents only a small number of possible markers. The skilled worker is familiar with such markers. Different markers are preferred, depending on the organism and the selection method.

[0074] It is known that upon stable or transient integration of nucleic acids into plant cells, only a minority of the cells takes up the foreign DNA and, if desired, integrates it into its genome, depending on the expression vector used and the transfection technique used. To identify and select these integrants, a gene coding for a selectable marker (such as the ones described above) is usually introduced into the host cells together with the gene of interest. These markers can for example be used in mutants in which these genes are not functional by, for example, deletion by conventional methods. Furthermore, nucleic acid molecules encoding a selectable marker can be introduced into a host cell on the same vector that comprises the sequence encoding the polypeptides of the invention or used in the methods of the invention, or else in a separate vector. Cells which have been stably transfected with the introduced nucleic acid can be identified for example by selection (for example, cells which have integrated the selectable marker survive whereas the other cells die).

[0075] Since the marker genes, particularly genes for resistance to antibiotics and herbicides, are no longer required or are undesired in the transgenic host cell once the nucleic acids have been introduced successfully, the process according to the invention for introducing the nucleic acids advantageously employs techniques which enable the removal or excision of these marker genes. One such a method is what is known as co-transformation. The co-transformation method employs two vectors simultaneously for the transformation, one vector bearing the nucleic acid according to the invention and a second bearing the marker gene(s). A large proportion of transformants receives or, in the case of plants, comprises (up to 40% or more of the transformants), both vectors. In case of transformation with Agrobacteria, the transformants usually receive only a part of the vector, i.e. the sequence flanked by the T-DNA, which usually represents the expression cassette. The marker genes can subsequently be removed from the transformed plant by performing crosses. In another method, marker genes integrated into a transposon are used for the transformation together with desired nucleic acid (known as the Ac/Ds technology). The transformants can be crossed with a transposase source or the transformants are transformed with a nucleic acid construct conferring expression of a transposase, transiently or stable. In some cases (approx. 10%), the transposon jumps out of the genome of the host cell once transformation has taken place successfully and is lost. In a further number of cases, the transposon jumps to a different location. In these cases the marker gene must be eliminated by performing crosses. In microbiology, techniques were developed which make possible, or facilitate, the detection of such events. A further advantageous method relies on what is known as recombination systems; whose advantage is that elimination by crossing can be dispensed with. The best-known system of this type is what is known as the Cre/lox system. Cre1 is a recombinase that removes the sequences located between the loxP sequences. If the marker gene is integrated between the loxP sequences, it is removed once transformation has taken place successfully, by expression of the recombinase. Further recombination systems are the HIN/HIX, FLP/FRT and REP/STB system (Tribble et al., J. Biol. Chem., 275, 2000: 22255-22267; Velmurugan et al., J. Cell Biol., 149, 2000: 553-566). A site-specific integration into the plant genome of the nucleic acid sequences according to the invention is possible. Naturally, these methods can also be applied to microorganisms such as yeast, fungi or bacteria.

### Transgenic/Transgene/Recombinant

[0076] For the purposes of the invention, “transgenic”, “transgene” or “recombinant” means with regard to, for example, a nucleic acid sequence, an expression cassette, gene construct or a vector comprising the nucleic acid sequence or an organism transformed with the nucleic acid sequences, expression cassettes or vectors according to the invention, all those constructions brought about by recombinant methods in which either
[0077] (a) the nucleic acid sequences encoding proteins useful in the methods of the invention, or
[0078] (b) genetic control sequence(s) which is operably linked with the nucleic acid sequence according to the invention, for example a promoter, or
[0079] (c) a) and b)
   are not located in their natural genetic environment or have been modified by recombinant methods, it being possible for the modification to take the form of, for example, a substitution, addition, deletion, inversion or insertion of one or more nucleotide residues. The natural genetic environment is understood as meaning the natural genomic or chromosomal locus in the original plant or the presence in a genomic library. In the case of a genomic library, the natural genetic environment of the nucleic acid sequence is preferably retained, at least in part. The environment flanks the nucleic acid sequence at least on one side and has a sequence length of at least 50 bp, preferably at least 500 bp, especially preferably at least 1000 bp, most preferably at least 5000 bp. A naturally occurring expression cassette—for example the naturally occurring combination of the natural promoter of the nucleic acid sequences with the corresponding nucleic acid sequence encoding a polypeptide useful in the methods of the present invention, as defined above—becomes a transgenic expression cassette when this expression cassette is modified by non-natural, synthetic (“artificial”) methods such as, for example, mutagenic treatment. Suitable methods are described, for example, in U.S. Pat. No. 5,565,350 or WO 00/15815.

[0080] A transgenic plant for the purposes of the invention is thus understood as meaning, as above, that the nucleic acids used in the method of the invention are not present in, or originating from, the genome of said plant, or are present in the genome of said plant but not at their natural locus in the genome of said plant, it being possible for the nucleic acids to be expressed homologously or heterologously. However, as mentioned, transgenic also means that, while the nucleic acids according to the invention or used in the inventive method are at their natural position in the genome of a plant, the sequence has been modified with regard to the natural sequence, and/or that the regulatory sequences of the natural sequences have been modified. Transgenic is preferably understood as meaning the expression of the nucleic acids according to the invention at an unnatural locus in the genome, i.e. homologous or, preferably, heterologous expression of the nucleic acids takes place. Preferred transgenic plants are mentioned herein.

[0081] It shall further be noted that in the context of the present invention, the term “isolated nucleic acid” or “isolated polypeptide” may in some instances be considered as a synonym for a “recombinant nucleic acid” or a “recombinant polypeptide”, respectively and refers to a nucleic acid or polypeptide that is not located in its natural genetic environment and/or that has been modified by recombinant methods.

[0082] In one embodiment an isolated nucleic acid sequence or isolated nucleic acid molecule is one that is not in its native surrounding or its native nucleic acid neighbourhood, yet is physically and functionally connected to other nucleic acid sequences or nucleic acid molecules and is found as part of a nucleic acid construct, vector sequence or chromosome.

### Modulation

[0083] The term “modulation” means in relation to expression or gene expression, a process in which the expression level is changed by said gene expression in comparison to the control plant, the expression level may be increased or decreased. The original, unmodulated expression may be of any kind of expression of a structural RNA (rRNA, tRNA) or mRNA with subsequent translation. For the purposes of this invention, the original unmodulated expression may also be absence of any expression. The term “modulating the activity” or the term “modulating expression” shall mean any change of the expression of the inventive nucleic acid sequences or encoded proteins, which leads to increased yield and/or increased growth of the plants. The expression can increase from zero (absence of, or immeasurable expression) to a certain amount, or can decrease from a certain amount to immeasurable small amounts or zero.

### Expression

[0084] The term “expression” or “gene expression” means the transcription of a specific gene or specific genes or specific genetic construct. The term “expression” or “gene expression” in particular means the transcription of a gene or genes or genetic construct into structural RNA (rRNA, tRNA) or mRNA with or without subsequent translation of the latter into a protein. The process includes transcription of DNA and processing of the resulting mRNA product.

### Increased Expression/Overexpression

[0085] The term “increased expression” or “overexpression” as used herein means any form of expression that is additional to the original wild-type expression level. For the purposes of this invention, the original wild-type expression level might also be zero, i.e. absence of expression or immeasurable expression.

[0086] Methods for increasing expression of genes or gene products are well documented in the art and include, for example, overexpression driven by appropriate promoters, the use of transcription enhancers or translation enhancers. Isolated nucleic acids which serve as promoter or enhancer elements may be introduced in an appropriate position (typically upstream) of a non-heterologous form of a polynucleotide so as to upregulate expression of a nucleic acid encoding the polypeptide of interest. For example, endogenous promoters may be altered in vivo by mutation, deletion, and/or substitution (see, Kmiec, U.S. Pat. No. 5,565,350; Zarling et al., WO9322443), or isolated promoters may be introduced into a plant cell in the proper orientation and distance from a gene of the present invention so as to control the expression of the gene.

[0087] If polypeptide expression is desired, it is generally desirable to include a polyadenylation region at the 3′-end of a polynucleotide coding region. The polyadenylation region can be derived from the natural gene, from a variety of other plant genes, or from T-DNA. The 3′ end sequence to be added may be derived from, for example, the nopaline synthase or octopine synthase genes, or alternatively from another plant gene, or less preferably from any other eukaryotic gene.

[0088] An intron sequence may also be added to the 5′ untranslated region (UTR) or the coding sequence of the partial coding sequence to increase the amount of the mature message that accumulates in the cytosol. Inclusion of a spliceable intron in the transcription unit in both plant and animal expression constructs has been shown to increase gene expression at both the mRNA and protein levels up to 1000-fold (Buchman and Berg (1988) Mol. Cell biol. 8: 4395-4405; Callis et al. (1987) Genes Dev 1:1183-1200). Such intron enhancement of gene expression is typically greatest when placed near the 5′ end of the transcription unit. Use of the maize introns Adh1-S intron 1, 2, and 6, the Bronze-1 intron are known in the art. For general information see: The Maize Handbook, Chapter 116, Freeling and Walbot, Eds., Springer, N.Y. (1994).

### Decreased Expression

[0089] Reference herein to “decreased expression” or “reduction or substantial elimination” of expression is taken to mean a decrease in endogenous gene expression and/or polypeptide levels and/or polypeptide activity relative to control plants. The reduction or substantial elimination is in increasing order of preference at least 10%, 20%, 30%, 40% or 50%, 60%, 70%, 80%, 85%, 90%, or 95%, 96%, 97%, 98%, 99% or more reduced compared to that of control plants.

[0090] For the reduction or substantial elimination of expression an endogenous gene in a plant, a sufficient length of substantially contiguous nucleotides of a nucleic acid sequence is required. In order to perform gene silencing, this may be as little as 20, 19, 18, 17, 16, 15, 14, 13, 12, 11, 10 or fewer nucleotides, alternatively this may be as much as the entire gene (including the 5′ and/or 3′ UTR, either in part or in whole). The stretch of substantially contiguous nucleotides may be derived from the nucleic acid encoding the protein of interest (target gene), or from any nucleic acid capable of encoding an orthologue, paralogue or homologue of the protein of interest. Preferably, the stretch of substantially contiguous nucleotides is capable of forming hydrogen bonds with the target gene (either sense or antisense strand), more preferably, the stretch of substantially contiguous nucleotides has, in increasing order of preference, 50%, 60%, 70%, 80%, 85%, 90%, 95%, 96%, 97%, 98%, 99%, 100% sequence identity to the target gene (either sense or antisense strand). A nucleic acid sequence encoding a (functional) polypeptide is not a requirement for the various methods discussed herein for the reduction or substantial elimination of expression of an endogenous gene.

[0091] This reduction or substantial elimination of expression may be achieved using routine tools and techniques. A preferred method for the reduction or substantial elimination of endogenous gene expression is by introducing and expressing in a plant a genetic construct into which the nucleic acid (in this case a stretch of substantially contiguous nucleotides derived from the gene of interest, or from any nucleic acid capable of encoding an orthologue, paralogue or homologue of any one of the protein of interest) is cloned as an inverted repeat (in part or completely), separated by a spacer (non-coding DNA).

[0092] In such a preferred method, expression of the endogenous gene is reduced or substantially eliminated through RNA-mediated silencing using an inverted repeat of a nucleic acid or a part thereof (in this case a stretch of substantially contiguous nucleotides derived from the gene of interest, or from any nucleic acid capable of encoding an orthologue, paralogue or homologue of the protein of interest), preferably capable of forming a hairpin structure. The inverted repeat is cloned in an expression vector comprising control sequences. A non-coding DNA nucleic acid sequence (a spacer, for example a matrix attachment region fragment (MAR), an intron, a polylinker, etc.) is located between the two inverted nucleic acids forming the inverted repeat. After transcription of the inverted repeat, a chimeric RNA with a self-complementary structure is formed (partial or complete). This double-stranded RNA structure is referred to as the hairpin RNA (hpRNA). The hpRNA is processed by the plant into siRNAs that are incorporated into an RNA-induced silencing complex (RISC). The RISC further cleaves the mRNA transcripts, thereby substantially reducing the number of mRNA transcripts to be translated into polypeptides. For further general details see for example, Grierson et al. (1998) WO 98/53083; Waterhouse et al. (1999) WO 99/53050).

[0093] Performance of the methods of the invention does not rely on introducing and expressing in a plant a genetic construct into which the nucleic acid is cloned as an inverted repeat, but any one or more of several well-known “gene silencing” methods may be used to achieve the same effects.

[0094] One such method for the reduction of endogenous gene expression is RNA-mediated silencing of gene expression (downregulation). Silencing in this case is triggered in a plant by a double stranded RNA sequence (dsRNA) that is substantially similar to the target endogenous gene. This dsRNA is further processed by the plant into about 20 to about 26 nucleotides called short interfering RNAs (siRNAs). The siRNAs are incorporated into an RNA-induced silencing complex (RISC) that cleaves the mRNA transcript of the endogenous target gene, thereby substantially reducing the number of mRNA transcripts to be translated into a polypeptide. Preferably, the double stranded RNA sequence corresponds to a target gene.

[0095] Another example of an RNA silencing method involves the introduction of nucleic acid sequences or parts thereof (in this case a stretch of substantially contiguous nucleotides derived from the gene of interest, or from any nucleic acid capable of encoding an orthologue, paralogue or homologue of the protein of interest) in a sense orientation into a plant. “Sense orientation” refers to a DNA sequence that is homologous to an mRNA transcript thereof. Introduced into a plant would therefore be at least one copy of the nucleic acid sequence. The additional nucleic acid sequence will reduce expression of the endogenous gene, giving rise to a phenomenon known as co-suppression. The reduction of gene expression will be more pronounced if several additional copies of a nucleic acid sequence are introduced into the plant, as there is a positive correlation between high transcript levels and the triggering of co-suppression.

[0096] Another example of an RNA silencing method involves the use of antisense nucleic acid sequences. An “antisense” nucleic acid sequence comprises a nucleotide sequence that is complementary to a “sense” nucleic acid sequence encoding a protein, i.e. complementary to the coding strand of a double-stranded cDNA molecule or complementary to an mRNA transcript sequence. The antisense nucleic acid sequence is preferably complementary to the endogenous gene to be silenced. The complementarity may be located in the “coding region” and/or in the “non-coding region” of a gene. The term “coding region” refers to a region of the nucleotide sequence comprising codons that are translated into amino acid residues. The term “non-coding region” refers to 5′ and 3′ sequences that flank the coding region that are transcribed but not translated into amino acids (also referred to as 5′ and 3′ untranslated regions).

[0097] Antisense nucleic acid sequences can be designed according to the rules of Watson and Crick base pairing. The antisense nucleic acid sequence may be complementary to the entire nucleic acid sequence (in this case a stretch of substantially contiguous nucleotides derived from the gene of interest, or from any nucleic acid capable of encoding an orthologue, paralogue or homologue of the protein of interest), but may also be an oligonucleotide that is antisense to only a part of the nucleic acid sequence (including the mRNA 5′ and 3′ UTR). For example, the antisense oligonucleotide sequence may be complementary to the region surrounding the translation start site of an mRNA transcript encoding a polypeptide. The length of a suitable antisense oligonucleotide sequence is known in the art and may start from about 50, 45, 40, 35, 30, 25, 20, 15 or 10 nucleotides in length or less. An antisense nucleic acid sequence according to the invention may be constructed using chemical synthesis and enzymatic ligation reactions using methods known in the art. For example, an antisense nucleic acid sequence (e.g., an antisense oligonucleotide sequence) may be chemically synthesized using naturally occurring nucleotides or variously modified nucleotides designed to increase the biological stability of the molecules or to increase the physical stability of the duplex formed between the antisense and sense nucleic acid sequences, e.g., phosphorothioate derivatives and acridine substituted nucleotides may be used. Examples of modified nucleotides that may be used to generate the antisense nucleic acid sequences are well known in the art. Known nucleotide modifications include methylation, cyclization and ‘caps’ and substitution of one or more of the naturally occurring nucleotides with an analogue such as inosine. Other modifications of nucleotides are well known in the art.

[0098] The antisense nucleic acid sequence can be produced biologically using an expression vector into which a nucleic acid sequence has been subcloned in an antisense orientation (i.e., RNA transcribed from the inserted nucleic acid will be of an antisense orientation to a target nucleic acid of interest). Preferably, production of antisense nucleic acid sequences in plants occurs by means of a stably integrated nucleic acid construct comprising a promoter, an operably linked antisense oligonucleotide, and a terminator.

[0099] The nucleic acid molecules used for silencing in the methods of the invention (whether introduced into a plant or generated in situ) hybridize with or bind to mRNA transcripts and/or genomic DNA encoding a polypeptide to thereby inhibit expression of the protein, e.g., by inhibiting transcription and/or translation. The hybridization can be by conventional nucleotide complementarity to form a stable duplex, or, for example, in the case of an antisense nucleic acid sequence which binds to DNA duplexes, through specific interactions in the major groove of the double helix. Antisense nucleic acid sequences may be introduced into a plant by transformation or direct injection at a specific tissue site. Alternatively, antisense nucleic acid sequences can be modified to target selected cells and then administered systemically. For example, for systemic administration, antisense nucleic acid sequences can be modified such that they specifically bind to receptors or antigens expressed on a selected cell surface, e.g., by linking the antisense nucleic acid sequence to peptides or antibodies which bind to cell surface receptors or antigens. The antisense nucleic acid sequences can also be delivered to cells using the vectors described herein.

[0100] According to a further aspect, the antisense nucleic acid sequence is an a-anomeric nucleic acid sequence. An a-anomeric nucleic acid sequence forms specific double-stranded hybrids with complementary RNA in which, contrary to the usual b-units, the strands run parallel to each other (Gaultier et al. (1987) Nucl Ac Res 15: 6625-6641). The antisense nucleic acid sequence may also comprise a 2′-o-methylribonucleotide (Inoue et al. (1987) Nucl Ac Res 15, 6131-6148) or a chimeric RNA-DNA analogue (Inoue et al. (1987) FEBS Lett. 215, 327-330).

[0101] The reduction or substantial elimination of endogenous gene expression may also be performed using ribozymes. Ribozymes are catalytic RNA molecules with ribonuclease activity that are capable of cleaving a single-stranded nucleic acid sequence, such as an mRNA, to which they have a complementary region. Thus, ribozymes (e.g., hammerhead ribozymes (described in Haselhoff and Gerlach (1988) Nature 334, 585-591) can be used to catalytically cleave mRNA transcripts encoding a polypeptide, thereby substantially reducing the number of mRNA transcripts to be translated into a polypeptide. A ribozyme having specificity for a nucleic acid sequence can be designed (see for example: Cech et al. U.S. Pat. No. 4,987,071; and Cech et al. U.S. Pat. No. 5,116,742). Alternatively, mRNA transcripts corresponding to a nucleic acid sequence can be used to select a catalytic RNA having a specific ribonuclease activity from a pool of RNA molecules (Bartel and Szostak (1993) Science 261, 1411-1418). The use of ribozymes for gene silencing in plants is known in the art (e.g., Atkins et al. (1994) WO 94/00012; Lenne et al. (1995) WO 95/03404; Lutziger et al. (2000) WO 00/00619; Prinsen et al. (1997) WO 97/13865 and Scott et al. (1997) WO 97/38116).

[0102] Gene silencing may also be achieved by insertion mutagenesis (for example, T-DNA insertion or transposon insertion) or by strategies as described by, among others, Angell and Baulcombe ((1999) Plant J 20(3): 357-62), (Amplicon VIGS WO 98/36083), or Baulcombe (WO 99/15682).

[0103] Gene silencing may also occur if there is a mutation on an endogenous gene and/or a mutation on an isolated gene/nucleic acid subsequently introduced into a plant. The reduction or substantial elimination may be caused by a non-functional polypeptide. For example, the polypeptide may bind to various interacting proteins; one or more mutation(s) and/or truncation(s) may therefore provide for a polypeptide that is still able to bind interacting proteins (such as receptor proteins) but that cannot exhibit its normal function (such as signalling ligand).

[0104] A further approach to gene silencing is by targeting nucleic acid sequences complementary to the regulatory region of the gene (e.g., the promoter and/or enhancers) to form triple helical structures that prevent transcription of the gene in target cells. See Helene, C., Anticancer Drug Res. 6, 569-84, 1991; Helene et al., Ann. N.Y. Acad. Sci. 660, 27-36 1992; and Maher, L. J. Bioassays 14, 807-15, 1992.

[0105] Other methods, such as the use of antibodies directed to an endogenous polypeptide for inhibiting its function in planta, or interference in the signalling pathway in which a polypeptide is involved, will be well known to the skilled man. In particular, it can be envisaged that manmade molecules may be useful for inhibiting the biological function of a target polypeptide, or for interfering with the signalling pathway in which the target polypeptide is involved.

[0106] Alternatively, a screening program may be set up to identify in a plant population natural variants of a gene, which variants encode polypeptides with reduced activity. Such natural variants may also be used for example, to perform homologous recombination.

[0107] Artificial and/or natural microRNAs (miRNAs) may be used to knock out gene expression and/or mRNA translation. Endogenous miRNAs are single stranded small RNAs of typically 19-24 nucleotides long. They function primarily to regulate gene expression and/or mRNA translation. Most plant microRNAs (miRNAs) have perfect or near-perfect complementarity with their target sequences. However, there are natural targets with up to five mismatches. They are processed from longer non-coding RNAs with characteristic fold-back structures by double-strand specific RNases of the Dicer family. Upon processing, they are incorporated in the RNA-induced silencing complex (RISC) by binding to its main component, an Argonaute protein. MiRNAs serve as the specificity components of RISC, since they base-pair to target nucleic acids, mostly mRNAs, in the cytoplasm. Subsequent regulatory events include target mRNA cleavage and destruction and/or translational inhibition. Effects of miRNA overexpression are thus often reflected in decreased mRNA levels of target genes.

[0108] Artificial microRNAs (amiRNAs), which are typically 21 nucleotides in length, can be genetically engineered specifically to negatively regulate gene expression of single or multiple genes of interest. Determinants of plant microRNA target selection are well known in the art. Empirical parameters for target recognition have been defined and can be used to aid in the design of specific amiRNAs, (Schwab et al., Dev. Cell 8, 517-527, 2005). Convenient tools for design and generation of amiRNAs and their precursors are also available to the public (Schwab et al., Plant Cell 18, 1121-1133, 2006).

[0109] For optimal performance, the gene silencing techniques used for reducing expression in a plant of an endogenous gene requires the use of nucleic acid sequences from monocotyledonous plants for transformation of monocotyledonous plants, and from dicotyledonous plants for transformation of dicotyledonous plants. Preferably, a nucleic acid sequence from any given plant species is introduced into that same species. For example, a nucleic acid sequence from rice is transformed into a rice plant. However, it is not an absolute requirement that the nucleic acid sequence to be introduced originates from the same plant species as the plant in which it will be introduced. It is sufficient that there is substantial homology between the endogenous target gene and the nucleic acid to be introduced.

[0110] Described above are examples of various methods for the reduction or substantial elimination of expression in a plant of an endogenous gene. A person skilled in the art would readily be able to adapt the aforementioned methods for silencing so as to achieve reduction of expression of an endogenous gene in a whole plant or in parts thereof through the use of an appropriate promoter, for example.

### Transformation

[0111] The term “introduction” or “transformation” as referred to herein encompasses the transfer of an exogenous polynucleotide into a host cell, irrespective of the method used for transfer. Plant tissue capable of subsequent clonal propagation, whether by organogenesis or embryogenesis, may be transformed with a genetic construct of the present invention and a whole plant regenerated there from. The particular tissue chosen will vary depending on the clonal propagation systems available for, and best suited to, the particular species being transformed. Exemplary tissue targets include leaf disks, pollen, embryos, cotyledons, hypocotyls, megagametophytes, callus tissue, existing meristematic tissue (e.g., apical meristem, axillary buds, and root meristems), and induced meristem tissue (e.g., cotyledon meristem and hypocotyl meristem). The polynucleotide may be transiently or stably introduced into a host cell and may be maintained non-integrated, for example, as a plasmid. Alternatively, it may be integrated into the host genome. The resulting transformed plant cell may then be used to regenerate a transformed plant in a manner known to persons skilled in the art. Alternatively, a plant cell that cannot be regenerated into a plant may be chosen as host cell, i.e. the resulting transformed plant cell does not have the capacity to regenerate into a (whole) plant.

[0112] The transfer of foreign genes into the genome of a plant is called transformation. Transformation of plant species is now a fairly routine technique. Advantageously, any of several transformation methods may be used to introduce the gene of interest into a suitable ancestor cell. The methods described for the transformation and regeneration of plants from plant tissues or plant cells may be utilized for transient or for stable transformation. Transformation methods include the use of liposomes, electroporation, chemicals that increase free DNA uptake, injection of the DNA directly into the plant, particle gun bombardment, transformation using viruses or pollen and microprojection. Methods may be selected from the calcium/polyethylene glycol method for protoplasts (Krens, F. A. et al., (1982) Nature 296, 72-74; Negrutiu I et al. (1987) Plant Mol Biol 8: 363-373); electroporation of protoplasts (Shillito R. D. et al. (1985) Bio/Technol 3, 1099-1102); microinjection into plant material (Crossway A et al., (1986) Mol. Gen Genet 202: 179-185); DNA or RNA-coated particle bombardment (Klein T M et al., (1987) Nature 327: 70) infection with (non-integrative) viruses and the like. Transgenic plants, including transgenic crop plants, are preferably produced via Agrobacterium-mediated transformation. An advantageous transformation method is the transformation in planta. To this end, it is possible, for example, to allow the agrobacteria to act on plant seeds or to inoculate the plant meristem with agrobacteria. It has proved particularly expedient in accordance with the invention to allow a suspension of transformed agrobacteria to act on the intact plant or at least on the flower primordia. The plant is subsequently grown on until the seeds of the treated plant are obtained (Clough and Bent, Plant J. (1998) 16, 735-743). Methods for Agrobacterium-mediated transformation of rice include well known methods for rice transformation, such as those described in any of the following: European patent application EP 1198985 A1, Aldemita and Hodges (Planta 199: 612-617, 1996); Chan et al. (Plant Mol Biol 22 (3): 491-506, 1993), Hiei et al. (Plant J 6 (2): 271-282, 1994), which disclosures are incorporated by reference herein as if fully set forth. In the case of corn transformation, the preferred method is as described in either Ishida et al. (Nat. Biotechnol 14(6): 745-50, 1996) or Frame et al. (Plant Physiol 129(1): 13-22, 2002), which disclosures are incorporated by reference herein as if fully set forth. Said methods are further described by way of example in B. Jenes et al., Techniques for Gene Transfer, in: Transgenic Plants, Vol. 1, Engineering and Utilization, eds. S. D. Kung and R. Wu, Academic Press (1993) 128-143 and in Potrykus Annu. Rev. Plant Physiol. Plant Molec. Biol. 42 (1991) 205-225). The nucleic acids or the construct to be expressed is preferably cloned into a vector, which is suitable for transforming Agrobacterium tumefaciens, for example pBin19 (Bevan et al., Nucl. Acids Res. 12 (1984) 8711). Agrobacteria transformed by such a vector can then be used in known manner for the transformation of plants, such as plants used as a model, like Arabidopsis (Arabidopsis thaliana is within the scope of the present invention not considered as a crop plant), or crop plants such as, by way of example, tobacco plants, for example by immersing bruised leaves or chopped leaves in an agrobacterial solution and then culturing them in suitable media. The transformation of plants by means of Agrobacterium tumefaciens is described, for example, by Hofgen and Willmitzer in Nucl. Acid Res. (1988) 16, 9877 or is known inter alia from F. F. White, Vectors for Gene Transfer in Higher Plants; in Transgenic Plants, Vol. 1, Engineering and Utilization, eds. S. D. Kung and R. Wu, Academic Press, 1993, pp. 15-38.

[0113] In addition to the transformation of somatic cells, which then have to be regenerated into intact plants, it is also possible to transform the cells of plant meristems and in particular those cells which develop into gametes. In this case, the transformed gametes follow the natural plant development, giving rise to transgenic plants. Thus, for example, seeds of Arabidopsis are treated with agrobacteria and seeds are obtained from the developing plants of which a certain proportion is transformed and thus transgenic [Feldman, K A and Marks M D (1987). Mol Gen Genet 208:1-9; Feldmann K (1992). In: C Koncz, N-H Chua and J Shell, eds, Methods in Arabidopsis Research. Word Scientific, Singapore, pp. 274-289]. Alternative methods are based on the repeated removal of the inflorescences and incubation of the excision site in the center of the rosette with transformed agrobacteria, whereby transformed seeds can likewise be obtained at a later point in time (Chang (1994). Plant J. 5: 551-558; Katavic (1994). Mol Gen Genet, 245: 363-370). However, an especially effective method is the vacuum infiltration method with its modifications such as the “floral dip” method. In the case of vacuum infiltration of Arabidopsis, intact plants under reduced pressure are treated with an agrobacterial suspension [Bechthold, N (1993). C R Acad Sci Paris Life Sci, 316: 1194-1199], while in the case of the “floral dip” method the developing floral tissue is incubated briefly with a surfactant-treated agrobacterial suspension [Clough, S J and Bent A F (1998) The Plant J. 16, 735-743]. A certain proportion of transgenic seeds are harvested in both cases, and these seeds can be distinguished from non-transgenic seeds by growing under the above-described selective conditions. In addition the stable transformation of plastids is of advantages because plastids are inherited maternally is most crops reducing or eliminating the risk of transgene flow through pollen. The transformation of the chloroplast genome is generally achieved by a process which has been schematically displayed in Klaus et al., 2004 [Nature Biotechnology 22 (2), 225-229]. Briefly the sequences to be transformed are cloned together with a selectable marker gene between flanking sequences homologous to the chloroplast genome. These homologous flanking sequences direct site specific integration into the plastome. Plastidal transformation has been described for many different plant species and an overview is given in Bock (2001) Transgenic plastids in basic research and plant biotechnology. J Mol Biol. 2001 Sep. 21; 312 (3):425-38 or Maliga, P (2003) Progress towards commercialization of plastid transformation technology. Trends Biotechnol. 21, 20-28. Further biotechnological progress has recently been reported in form of marker free plastid transformants, which can be produced by a transient co-integrated maker gene (Klaus et al., 2004, Nature Biotechnology 22(2), 225-229).

[0114] The genetically modified plant cells can be regenerated via all methods with which the skilled worker is familiar. Suitable methods can be found in the abovementioned publications by S. D. Kung and R. Wu, Potrykus or Höfgen and Willmitzer. Alternatively, the genetically modified plant cells are non-regenerable into a whole plant.

[0115] Generally after transformation, plant cells or cell groupings are selected for the presence of one or more markers which are encoded by plant-expressible genes co-transferred with the gene of interest, following which the transformed material is regenerated into a whole plant. To select transformed plants, the plant material obtained in the transformation is, as a rule, subjected to selective conditions so that transformed plants can be distinguished from untransformed plants. For example, the seeds obtained in the above-described manner can be planted and, after an initial growing period, subjected to a suitable selection by spraying. A further possibility consists in growing the seeds, if appropriate after sterilization, on agar plates using a suitable selection agent so that only the transformed seeds can grow into plants. Alternatively, the transformed plants are screened for the presence of a selectable marker such as the ones described above.

[0116] Following DNA transfer and regeneration, putatively transformed plants may also be evaluated, for instance using Southern analysis, for the presence of the gene of interest, copy number and/or genomic organisation. Alternatively or additionally, expression levels of the newly introduced DNA may be monitored using Northern and/or Western analysis, both techniques being well known to persons having ordinary skill in the art.

[0117] The generated transformed plants may be propagated by a variety of means, such as by clonal propagation or classical breeding techniques. For example, a first generation (or T1) transformed plant may be selfed and homozygous second-generation (or T2) transformants selected, and the T2 plants may then further be propagated through classical breeding techniques. The generated transformed organisms may take a variety of forms. For example, they may be chimeras of transformed cells and non-transformed cells; clonal transformants (e.g., all cells transformed to contain the expression cassette); grafts of transformed and untransformed tissues (e.g., in plants, a transformed rootstock grafted to an untransformed scion).

[0118] Throughout this application a plant, plant part, seed or plant cell transformed with—or interchangeably transformed by—a construct or transformed with or by a nucleic acid is to be understood as meaning a plant, plant part, seed or plant cell that carries said construct or said nucleic acid as a transgene due the result of an introduction of said construct or said nucleic acid by biotechnological means. The plant, plant part, seed or plant cell therefore comprises said recombinant construct or said recombinant nucleic acid. Any plant, plant part, seed or plant cell that no longer contains said recombinant construct or said recombinant nucleic acid after introduction in the past, is termed null-segregant, nullizygote or null control, but is not considered a plant, plant part, seed or plant cell transformed with said construct or with said nucleic acid within the meaning of this application.

### T-DNA Activation Tagging

[0119] “T-DNA activation” tagging (Hayashi et al. Science (1992) 1350-1353), involves insertion of T-DNA, usually containing a promoter (may also be a translation enhancer or an intron), in the genomic region of the gene of interest or 10 kb up- or downstream of the coding region of a gene in a configuration such that the promoter directs expression of the targeted gene. Typically, regulation of expression of the targeted gene by its natural promoter is disrupted and the gene falls under the control of the newly introduced promoter. The promoter is typically embedded in a T-DNA. This T-DNA is randomly inserted into the plant genome, for example, through Agrobacterium infection and leads to modified expression of genes near the inserted T-DNA. The resulting transgenic plants show dominant phenotypes due to modified expression of genes close to the introduced promoter.

### Tilling

[0120] The term “TILLING” is an abbreviation of “Targeted Induced Local Lesions In Genomes” and refers to a mutagenesis technology useful to generate and/or identify nucleic acids encoding proteins with modified expression and/or activity. TILLING also allows selection of plants carrying such mutant variants. These mutant variants may exhibit modified expression, either in strength or in location or in timing (if the mutations affect the promoter for example). These mutant variants may exhibit higher activity than that exhibited by the gene in its natural form. TILLING combines high-density mutagenesis with high-throughput screening methods. The steps typically followed in TILLING are: (a) EMS mutagenesis (Redei G P and Koncz C (1992) In Methods in Arabidopsis Research, Koncz C, Chua N H, Schell J, eds. Singapore, World Scientific Publishing Co, pp. 16-82; Feldmann et al., (1994) In Meyerowitz E M, Somerville C R, eds, Arabidopsis. Cold Spring Harbor Laboratory Press, Cold Spring Harbor, N.Y., pp 137-172; Lightner J and Caspar T (1998) In J Martinez-Zapater, J Salinas, eds, Methods on Molecular Biology, Vol. 82. Humana Press, Totowa, N.J., pp 91-104); (b) DNA preparation and pooling of individuals; (c) PCR amplification of a region of interest; (d) denaturation and annealing to allow formation of heteroduplexes; (e) DHPLC, where the presence of a heteroduplex in a pool is detected as an extra peak in the chromatogram; (f) identification of the mutant individual; and (g) sequencing of the mutant PCR product. Methods for TILLING are well known in the art (McCallum et al., (2000) Nat Biotechnol 18: 455-457; reviewed by Stemple (2004) Nat Rev Genet 5(2): 145-50).

### Homologous Recombination

[0121] “Homologous recombination” allows introduction in a genome of a selected nucleic acid at a defined selected position. Homologous recombination is a standard technology used routinely in biological sciences for lower organisms such as yeast or the moss Physcomitrella. Methods for performing homologous recombination in plants have been described not only for model plants (Offringa et al. (1990) EMBO J 9(10): 3077-84) but also for crop plants, for example rice (Terada et al. (2002) Nat Biotech 20(10): 1030-4; lida and Terada (2004) Curr Opin Biotech 15(2): 132-8), and approaches exist that are generally applicable regardless of the target organism (Miller et al, Nature Biotechnol. 25, 778-785, 2007).

### Yield Related Trait(s)

[0122] A “Yield related trait” is a trait or feature which is related to plant yield. Yield-related traits may comprise one or more of the following non-limitative list of features: early flowering time, yield, biomass, seed yield, early vigour, greenness index, growth rate, agronomic traits, such as e.g. tolerance to submergence (which leads to yield in rice), Water Use Efficiency (WUE), Nitrogen Use Efficiency (NUE), etc.

[0123] Reference herein to enhanced yield-related traits, relative to of control plants is taken to mean one or more of an increase in early vigour and/or in biomass (weight) of one or more parts of a plant, which may include (i) aboveground parts and preferably aboveground harvestable parts and/or (ii) parts below ground and preferably harvestable below ground. In particular, such harvestable parts are roots such as taproots, stems, beets, leaves, flowers or seeds, and performance of the methods of the invention results in plants having increased seed yield relative to the seed yield of control plants, and/or increased stem biomass relative to the stem biomass of control plants, and/or increased root biomass relative to the root biomass of control plants and/or increased beet biomass relative to the beet biomass of control plants. Moreover, it is particularly contemplated that the sugar content (in particular the sucrose content) in the above ground parts, particularly stem (in particular of sugar cane plants) and/or in the below ground parts, in particular in roots including taproots, tubers and/or beets (in particular in sugar beets) is increased relative to the sugar content (in particular the sucrose content) in corresponding part(s) of the control plant.

[0124] In an alternative embodiment, such harvestable parts are seeds.

### Yield

[0125] The term “yield” in general means a measurable produce of economic value, typically related to a specified crop, to an area, and to a period of time. Individual plant parts directly contribute to yield based on their number, size and/or weight, or the actual yield is the yield per square meter for a crop and year, which is determined by dividing total production (includes both harvested and appraised production) by planted square meters.

[0126] The terms “yield” of a plant and “plant yield” are used interchangeably herein and are meant to refer to vegetative biomass such as root and/or shoot biomass, to reproductive organs, and/or to propagules such as seeds of that plant.

[0127] Flowers in maize are unisexual; male inflorescences (tassels) originate from the apical stem and female inflorescences (ears) arise from axillary bud apices. The female inflorescence produces pairs of spikelets on the surface of a central axis (cob). Each of the female spikelets encloses two fertile florets, one of them will usually mature into a maize kernel once fertilized. Hence a yield increase in maize may be manifested as one or more of the following: increase in the number of plants established per square meter, an increase in the number of ears per plant, an increase in the number of rows, number of kernels per row, kernel weight, thousand kernel weight, ear length/diameter, increase in the seed filling rate, which is the number of filled florets (i.e. florets containing seed) divided by the total number of florets and multiplied by 100), among others.

[0128] Inflorescences in rice plants are named panicles. The panicle bears spikelets, which are the basic units of the panicles, and which consist of a pedicel and a floret. The floret is borne on the pedicel and includes a flower that is covered by two protective glumes: a larger glume (the lemma) and a shorter glume (the palea). Hence, taking rice as an example, a yield increase may manifest itself as an increase in one or more of the following: number of plants per square meter, number of panicles per plant, panicle length, number of spikelets per panicle, number of flowers (or florets) per panicle; an increase in the seed filling rate which is the number of filled florets (i.e. florets containing seeds) divided by the total number of florets and multiplied by 100; an increase in thousand kernel weight, among others.

### Early Flowering Time

[0129] Plants having an “early flowering time” as used herein are plants which start to flower earlier than control plants. Hence this term refers to plants that show an earlier start of flowering. Flowering time of plants can be assessed by counting the number of days (“time to flower”) between sowing and the emergence of a first inflorescence. The “flowering time” of a plant can for instance be determined using the method as described in WO 2007/093444.

### Early Vigour

[0130] “Early vigour” refers to active healthy well-balanced growth especially during early stages of plant growth, and may result from increased plant fitness due to, for example, the plants being better adapted to their environment (i.e. optimizing the use of energy resources and partitioning between shoot and root). Plants having early vigour also show increased seedling survival and a better establishment of the crop, which often results in highly uniform fields (with the crop growing in uniform manner, i.e. with the majority of plants reaching the various stages of development at substantially the same time), and often better and higher yield. Therefore, early vigour may be determined by measuring various factors, such as thousand kernel weight, percentage germination, percentage emergence, seedling growth, seedling height, root length, root and shoot biomass and many more.

### Increased Growth Rate

[0131] The increased growth rate may be specific to one or more parts of a plant (including seeds), or may be throughout substantially the whole plant. Plants having an increased growth rate may have a shorter life cycle. The life cycle of a plant may be taken to mean the time needed to grow from a mature seed up to the stage where the plant has produced mature seeds, similar to the starting material. This life cycle may be influenced by factors such as speed of germination, early vigour, growth rate, greenness index, flowering time and speed of seed maturation. The increase in growth rate may take place at one or more stages in the life cycle of a plant or during substantially the whole plant life cycle. Increased growth rate during the early stages in the life cycle of a plant may reflect enhanced vigour. The increase in growth rate may alter the harvest cycle of a plant allowing plants to be sown later and/or harvested sooner than would otherwise be possible (a similar effect may be obtained with earlier flowering time). If the growth rate is sufficiently increased, it may allow for the further sowing of seeds of the same plant species (for example sowing and harvesting of rice plants followed by sowing and harvesting of further rice plants all within one conventional growing period). Similarly, if the growth rate is sufficiently increased, it may allow for the further sowing of seeds of different plants species (for example the sowing and harvesting of corn plants followed by, for example, the sowing and optional harvesting of soybean, potato or any other suitable plant). Harvesting additional times from the same rootstock in the case of some crop plants may also be possible. Altering the harvest cycle of a plant may lead to an increase in annual biomass production per square meter (due to an increase in the number of times (say in a year) that any particular plant may be grown and harvested). An increase in growth rate may also allow for the cultivation of transgenic plants in a wider geographical area than their wild-type counterparts, since the territorial limitations for growing a crop are often determined by adverse environmental conditions either at the time of planting (early season) or at the time of harvesting (late season). Such adverse conditions may be avoided if the harvest cycle is shortened. The growth rate may be determined by deriving various parameters from growth curves, such parameters may be: T-Mid (the time taken for plants to reach 50% of their maximal size) and T-90 (time taken for plants to reach 90% of their maximal size), amongst others.

### Stress Resistance

[0132] An increase in yield and/or growth rate occurs whether the plant is under non-stress conditions or whether the plant is exposed to various stresses compared to control plants. Plants typically respond to exposure to stress by growing more slowly. In conditions of severe stress, the plant may even stop growing altogether. Mild stress on the other hand is defined herein as being any stress to which a plant is exposed which does not result in the plant ceasing to grow altogether without the capacity to resume growth. Mild stress in the sense of the invention leads to a reduction in the growth of the stressed plants of less than 40%, 35%, 30% or 25%, more preferably less than 20% or 15% in comparison to the control plant under non-stress conditions. Due to advances in agricultural practices (irrigation, fertilization, pesticide treatments) severe stresses are not often encountered in cultivated crop plants. As a consequence, the compromised growth induced by mild stress is often an undesirable feature for agriculture. Abiotic stresses may be due to drought or excess water, anaerobic stress, salt stress, chemical toxicity, oxidative stress and hot, cold or freezing temperatures.

[0133] “Biotic stresses” are typically those stresses caused by pathogens, such as bacteria, viruses, fungi, nematodes and insects.

[0134] The “abiotic stress” may be an osmotic stress caused by a water stress, e.g. due to drought, salt stress, or freezing stress. Abiotic stress may also be an oxidative stress or a cold stress. “Freezing stress” is intended to refer to stress due to freezing temperatures, i.e. temperatures at which available water molecules freeze and turn into ice. “Cold stress”, also called “chilling stress”, is intended to refer to cold temperatures, e.g. temperatures below 10°, or preferably below 5° C., but at which water molecules do not freeze. As reported in Wang et al. (Planta (2003) 218: 1-14), abiotic stress leads to a series of morphological, physiological, biochemical and molecular changes that adversely affect plant growth and productivity. Drought, salinity, extreme temperatures and oxidative stress are known to be interconnected and may induce growth and cellular damage through similar mechanisms. Rabbani et al. (Plant Physiol (2003) 133: 1755-1767) describes a particularly high degree of “cross talk” between drought stress and high-salinity stress. For example, drought and/or salinisation are manifested primarily as osmotic stress, resulting in the disruption of homeostasis and ion distribution in the cell. Oxidative stress, which frequently accompanies high or low temperature, salinity or drought stress, may cause denaturing of functional and structural proteins. As a consequence, these diverse environmental stresses often activate similar cell signalling pathways and cellular responses, such as the production of stress proteins, up-regulation of anti-oxidants, accumulation of compatible solutes and growth arrest. The term “non-stress” conditions as used herein are those environmental conditions that allow optimal growth of plants. Persons skilled in the art are aware of normal soil conditions and climatic conditions for a given location. Plants with optimal growth conditions, (grown under non-stress conditions) typically yield in increasing order of preference at least 97%, 95%, 92%, 90%, 87%, 85%, 83%, 80%, 77% or 75% of the average production of such plant in a given environment. Average production may be calculated on harvest and/or season basis. Persons skilled in the art are aware of average yield productions of a crop.

[0135] In particular, the methods of the present invention may be performed under non-stress conditions. In an example, the methods of the present invention may be performed under non-stress conditions such as mild drought to give plants having increased yield relative to control plants.

[0136] In another embodiment, the methods of the present invention may be performed under stress conditions.

[0137] In an example, the methods of the present invention may be performed under stress conditions such as drought to give plants having increased yield relative to control plants. In another example, the methods of the present invention may be performed under stress conditions such as nutrient deficiency to give plants having increased yield relative to control plants.

[0138] Nutrient deficiency may result from a lack of nutrients such as nitrogen, phosphates and other phosphorous-containing compounds, potassium, calcium, magnesium, manganese, iron and boron, amongst others.

[0139] In yet another example, the methods of the present invention may be performed under stress conditions such as salt stress to give plants having increased yield relative to control plants. The term salt stress is not restricted to common salt (NaCl), but may be any one or more of: NaCl, KCl, LiCI, MgCl₂, CaCl₂, amongst others.

[0140] In yet another example, the methods of the present invention may be performed under stress conditions such as cold stress or freezing stress to give plants having increased yield relative to control plants.

### Increase/Improve/Enhance

[0141] The terms “increase”, “improve” or “enhance” are interchangeable and shall mean in the sense of the application at least a 3%, 4%, 5%, 6%, 7%, 8%, 9% or 10%, preferably at least 15% or 20%, more preferably 25%, 30%, 35% or 40% more yield and/or growth in comparison to control plants as defined herein.

### Seed Yield

[0142] Increased seed yield may manifest itself as one or more of the following:
[0143] (a) an increase in seed biomass (total seed weight) which may be on an individual seed basis and/or per plant and/or per square meter;
[0144] (b) increased number of flowers per plant;
[0145] (c) increased number of seeds;
[0146] (d) increased seed filling rate (which is expressed as the ratio between the number of filled florets divided by the total number of florets);
[0147] (e) increased harvest index, which is expressed as a ratio of the yield of harvestable parts, such as seeds, divided by the biomass of aboveground plant parts; and
[0148] (f) increased thousand kernel weight (TKW), which is extrapolated from the number of seeds counted and their total weight. An increased TKW may result from an increased seed size and/or seed weight, and may also result from an increase in embryo and/or endosperm size.
   The terms “filled florets” and “filled seeds” may be considered synonyms.

[0149] An increase in seed yield may also be manifested as an increase in seed size and/or seed volume. Furthermore, an increase in seed yield may also manifest itself as an increase in seed area and/or seed length and/or seed width and/or seed perimeter.

### Greenness Index

[0150] The “greenness index” as used herein is calculated from digital images of plants. For each pixel belonging to the plant object on the image, the ratio of the green value versus the red value (in the RGB model for encoding color) is calculated. The greenness index is expressed as the percentage of pixels for which the green-to-red ratio exceeds a given threshold. Under normal growth conditions, under salt stress growth conditions, and under reduced nutrient availability growth conditions, the greenness index of plants is measured in the last imaging before flowering. In contrast, under drought stress growth conditions, the greenness index of plants is measured in the first imaging after drought.

### Biomass

[0151] The term “biomass” as used herein is intended to refer to the total weight of a plant. Within the definition of biomass, a distinction may be made between the biomass of one or more parts of a plant, which may include any one or more of the following:
[0152] aboveground parts such as but not limited to shoot biomass, seed biomass, leaf biomass, etc.;
[0153] aboveground harvestable parts such as but not limited to shoot biomass, seed biomass, leaf biomass, etc.;
[0154] parts below ground, such as but not limited to root biomass, tubers, bulbs, etc.;
[0155] harvestable parts below ground, such as but not limited to root biomass, tubers, bulbs, etc.;
[0156] harvestable parts partially below ground such as but not limited to beets and other hypocotyl areas of a plant, rhizomes, stolons or creeping rootstalks;
[0157] vegetative biomass such as root biomass, shoot biomass, etc.;
[0158] reproductive organs; and
[0159] propagules such as seed.

### Marker Assisted Breeding

[0160] Such breeding programmes sometimes require introduction of allelic variation by mutagenic treatment of the plants, using for example EMS mutagenesis; alternatively, the programme may start with a collection of allelic variants of so called “natural” origin caused unintentionally. Identification of allelic variants then takes place, for example, by PCR. This is followed by a step for selection of superior allelic variants of the sequence in question and which give increased yield. Selection is typically carried out by monitoring growth performance of plants containing different allelic variants of the sequence in question. Growth performance may be monitored in a greenhouse or in the field. Further optional steps include crossing plants in which the superior allelic variant was identified with another plant. This could be used, for example, to make a combination of interesting phenotypic features.

### Use as Probes in (Gene Mapping)

[0161] Use of nucleic acids encoding the protein of interest for genetically and physically mapping the genes requires only a nucleic acid sequence of at least 15 nucleotides in length. These nucleic acids may be used as restriction fragment length polymorphism (RFLP) markers. Southern blots (Sambrook J, Fritsch E F and Maniatis T (1989) Molecular Cloning, A Laboratory Manual) of restriction-digested plant genomic DNA may be probed with the nucleic acids encoding the protein of interest. The resulting banding patterns may then be subjected to genetic analyses using computer programs such as MapMaker (Lander et al. (1987) Genomics 1: 174-181) in order to construct a genetic map. In addition, the nucleic acids may be used to probe Southern blots containing restriction endonuclease-treated genomic DNAs of a set of individuals representing parent and progeny of a defined genetic cross. Segregation of the DNA polymorphisms is noted and used to calculate the position of the nucleic acid encoding the protein of interest in the genetic map previously obtained using this population (Botstein et al. (1980) Am. J. Hum. Genet. 32:314-331).

[0162] The production and use of plant gene-derived probes for use in genetic mapping is described in Bernatzky and Tanksley (1986) Plant Mol. Biol. Reporter 4: 37-41. Numerous publications describe genetic mapping of specific cDNA clones using the methodology outlined above or variations thereof. For example, F2 intercross populations, backcross populations, randomly mated populations, near isogenic lines, and other sets of individuals may be used for mapping. Such methodologies are well known to those skilled in the art.

[0163] The nucleic acid probes may also be used for physical mapping (i.e., placement of sequences on physical maps; see Hoheisel et al. In: Non-mammalian Genomic Analysis: A Practical Guide, Academic press 1996, pp. 319-346, and references cited therein).

[0164] In another embodiment, the nucleic acid probes may be used in direct fluorescence in situ hybridisation (FISH) mapping (Trask (1991) Trends Genet. 7:149-154). Although current methods of FISH mapping favour use of large clones (several kb to several hundred kb; see Laan et al. (1995) Genome Res. 5:13-20), improvements in sensitivity may allow performance of FISH mapping using shorter probes.

[0165] A variety of nucleic acid amplification-based methods for genetic and physical mapping may be carried out using the nucleic acids. Examples include allele-specific amplification (Kazazian (1989) J. Lab. Clin. Med 11:95-96), polymorphism of PCR-amplified fragments (CAPS; Sheffield et al. (1993) Genomics 16:325-332), allele-specific ligation (Landegren et al. (1988) Science 241:1077-1080), nucleotide extension reactions (Sokolov (1990) Nucleic Acid Res. 18:3671), Radiation Hybrid Mapping (Walter et al. (1997) Nat. Genet. 7:22-28) and Happy Mapping (Dear and Cook (1989) Nucleic Acid Res. 17:6795-6807). For these methods, the sequence of a nucleic acid is used to design and produce primer pairs for use in the amplification reaction or in primer extension reactions. The design of such primers is well known to those skilled in the art. In methods employing PCR-based genetic mapping, it may be necessary to identify DNA sequence differences between the parents of the mapping cross in the region corresponding to the instant nucleic acid sequence. This, however, is generally not necessary for mapping methods.

### Plant

[0166] The term “plant” as used herein encompasses whole plants, ancestors and progeny of the plants and plant parts, including seeds, shoots, stems, leaves, roots (including tubers), flowers, and tissues and organs, wherein each of the aforementioned comprise the gene/nucleic acid of interest. The term “plant” also encompasses plant cells, suspension cultures, callus tissue, embryos, meristematic regions, gametophytes, sporophytes, pollen and microspores, again wherein each of the aforementioned comprises the gene/nucleic acid of interest.

[0167] Plants that are particularly useful in the methods of the invention include all plants which belong to the superfamily Viridiplantae, in particular monocotyledonous and dicotyledonous plants including fodder or forage legumes, ornamental plants, food crops, trees or shrubs selected from the list comprising Acer spp., Actinidia spp., Abelmoschus spp., Agave sisalana, Agropyron spp., Agrostis stolonifera, Allium spp., Amaranthus spp., Ammophila arenaria, Ananas comosus, Annona spp., Apium graveolens, Arachis spp, Artocarpus spp., Asparagus officinalis, Avena spp. (e.g. Avena sativa, Avena fatua, Avena byzantina, Avena fatua var. sativa, Avena hybrida), Averrhoa carambola, Bambusa sp., Benincasa hispida, Bertholletia excelsea, Beta vulgaris, Brassica spp. (e.g. Brassica napus, Brassica rapa ssp. [canola, oilseed rape, turnip rape]), Cadaba farinosa, Camellia sinensis, Canna indica, Cannabis sativa, Capsicum spp., Carex elata, Carica papaya, Carissa macrocarpa, Carya spp., Carthamus tinctorius, Castanea spp., Ceiba pentandra, Cichorium endivia, Cinnamomum spp., Citrullus lanatus, Citrus spp., Cocos spp., Coffea spp., Colocasia esculenta, Cola spp., Corchorus sp., Coriandrum sativum, Corylus spp., Crataegus spp., Crocus sativus, Cucurbita spp., Cucumis spp., Cynara spp., Daucus carota, Desmodium spp., Dimocarpus longan, Dioscorea spp., Diospyros spp., Echinochloa spp., Elaeis (e.g. Elaeis guineensis, Elaeis oleifera), Eleusine coracana, Eragrostis tef, Erianthus sp., Eriobotrya japonica, Eucalyptus sp., Eugenia uniflora, Fagopyrum spp., Fagus spp., Festuca arundinacea, Ficus carica, Fortunella spp., Fragaria spp., Ginkgo biloba, Glycine spp. (e.g. Glycine max, Soja hispida or Soja max), Gossypium hirsutum, Helianthus spp. (e.g. Helianthus annuus), Hemerocallis fulva, Hibiscus spp., Hordeum spp. (e.g. Hordeum vulgare), Ipomoea batatas, Juglans spp., Lactuca sativa, Lathyrus spp., Lens culinaris, Linum usitatissimum, Litchi chinensis, Lotus spp., Luffa acutangula, Lupinus spp., Luzula sylvatica, Lycopersicon spp. (e.g. Lycopersicon esculentum, Lycopersicon lycopersicum, Lycopersicon pyriforme), Macrotyloma spp., Malus spp., Malpighia emarginata, Mammea americana, Mangifera indica, Manihot spp., Manilkara zapota, Medicago sativa, Melilotus spp., Mentha spp., Miscanthus sinensis, Momordica spp., Morus nigra, Musa spp., Nicotiana spp., Olea spp., Opuntia spp., Ornithopus spp., Oryza spp. (e.g. Oryza sativa, Oryza latifolia), Panicum miliaceum, Panicum virgatum, Passiflora edulis, Pastinaca sativa, Pennisetum sp., Persea spp., Petroselinum crispum, Phalaris arundinacea, Phaseolus spp., Phleum pratense, Phoenix spp., Phragmites australis, Physalis spp., Pinus spp., Pistacia vera, Pisum spp., Poa spp., Populus spp., Prosopis spp., Prunus spp., Psidium spp., Punica granatum, Pyrus communis, Quercus spp., Raphanus sativus, Rheum rhabarbarum, Ribes spp., Ricinus communis, Rubus spp., Saccharum spp., Salix sp., Sambucus spp., Secale cereale, Sesamum spp., Sinapis sp., Solanum spp. (e.g. Solanum tuberosum, Solanum integrifolium or Solanum lycopersicum), Sorghum bicolor, Spinacia spp., Syzygium spp., Tagetes spp., Tamarindus indica, Theobroma cacao, Trifolium spp., Tripsacum dactyloides, Triticosecale rimpaui, Triticum spp. (e.g. Triticum aestivum, Triticum durum, Triticum turgidum, Triticum hybernum, Triticum macha, Triticum sativum, Triticum monococcum or Triticum vulgare), Tropaeolum minus, Tropaeolum majus, Vaccinium spp., Vicia spp., Vigna spp., Viola odorata, Vitis spp., Zea mays, Zizania palustris, Ziziphus spp., amongst others.

[0168] With respect to the sequences of the invention, a nucleic acid or a polypeptide sequence of plant origin has the characteristic of a codon usage optimised for expression in plants, and of the use of amino acids and regulatory sites common in plants, respectively. The plant of origin may be any plant, but preferably those plants as described in the previous paragraph.

### Control Plant(s)

[0169] The choice of suitable control plants is a routine part of an experimental setup and may include corresponding wild type plants or corresponding plants without the gene of interest.

[0170] The control plant is typically of the same plant species or even of the same variety as the plant to be assessed. The control plant may also be a nullizygote of the plant to be assessed. Nullizygotes (or null control plants) are individuals missing the transgene by segregation. Further, control plants are grown under equal growing conditions to the growing conditions of the plants of the invention, i.e. in the vicinity of, and simultaneously with, the plants of the invention. A “control plant” as used herein refers not only to whole plants, but also to plant parts, including seeds and seed parts.

### DETAILED DESCRIPTION OF THE INVENTION

[0171] The present invention shows that modulating expression in a plant of a nucleic acid encoding an ELM2-related polypeptide, or a WRKY-related polypeptide, or an EMG1-like polypeptide, or a GPx-related polypeptide, gives plants having enhanced yield-related traits relative or compared to control plants. The terms “relative to” and “compared to” can be used interchangeably throughout the text of this patent application.

[0172] According to a first embodiment, the present invention provides a method for enhancing yield-related traits in plants relative to control plants, comprising modulating expression in a plant of a nucleic acid encoding an ELM2-related polypeptide, or a WRKY-related polypeptide, or an EMG1-like polypeptide, or a GPx-related polypeptide, and optionally selecting for plants having enhanced yield-related traits. According to another embodiment, the present invention provides a method for producing plants having enhanced yield-related traits relative to control plants, wherein said method comprises the steps of modulating expression in said plant of a nucleic acid encoding an ELM2-related polypeptide, or a WRKY-related polypeptide, or an EMG1-like polypeptide, or a GPx-related polypeptide, as described herein and optionally selecting for plants having enhanced yield-related traits.

[0173] A preferred method for modulating, preferably increasing, expression of a nucleic acid encoding an ELM2-related polypeptide, or a WRKY-related polypeptide, or an EMG1-like polypeptide, is by introducing and expressing in a plant a nucleic acid encoding an ELM2-related polypeptide, or a WRKY-related polypeptide, or an EMG1-like polypeptide, respectively. With respect to GPx-related polypeptides, a preferred method for modulating, preferably increasing, expression of a nucleic acid encoding a GPx-related polypeptide is by introducing and expressing in a plant a nucleic acid encoding a GPx-related polypeptide.

[0174] Any reference hereinafter to a “protein useful in the methods of the invention” is taken to mean an ELM2-related polypeptide, or a WRKY-related polypeptide, or an EMG1-like polypeptide, or a GPx-related polypeptide, as defined herein. Any reference hereinafter to a “nucleic acid useful in the methods of the invention” is taken to mean a nucleic acid capable of encoding such an ELM2-related polypeptide, or a WRKY-related polypeptide, or an EMG1-like polypeptide, or a GPx-related polypeptide. In one embodiment any reference to a protein or nucleic acid “useful in the methods of the invention” is to be understood to mean proteins or nucleic acids “useful in the methods, constructs, plants, harvestable parts and products of the invention”. The nucleic acid to be introduced into a plant (and therefore useful in performing the methods of the invention) is any nucleic acid encoding the type of protein which will now be described, hereafter also named “ELM2-related nucleic acid”, or “WRKY-related nucleic acid”, or “EMG1-like nucleic acid”, or “GPx-related nucleic acid”, or “ELM2-related gene”, or “WRKY-related gene”, or “EMG1-like gene”, or “GPx-related gene”.

[0175] The term “ELM2-related” or “ELM2-related polypeptide” as used herein also intends to include homologues as defined hereunder of “ELM2-related polypeptide”.

[0176] An “ELM2-related polypeptide” as defined herein refers to any polypeptide comprising one or more of the following motifs:

(i)
(SEQ ID NO: 93)
Motif 1: [I/V]GKGR[S/Q]DSC[G/R]CQV[Q/P][K/G]S[I/V]
[K/E]CVRFH[I/V][T/A]E[R/K][S/R][S/A/L][R/K][V/L]
[M/K][R/L] E[L/I]G[K/V/S]AF[N/Y][Q/H/A]W[R/G/N]
[F/L]D[K/R][M/A]GEE,
(ii)
(SEQ ID NO: 94)
Motif 2: [R/T/K]xFP[S/K][R/K][R/S/G]R[E/K][D/S/E]
LVSYY[Y/F]NVFLL[Q/R]RR[A/G][N/Y]QNR[S/H/V]TP
[D/N/K][S/N]I,
(iii)
(SEQ ID NO: 95)
Motif 3: [P/S][I/P][T/R]xxIP[V/L]GP[V/N][F/H]QAE
[V/I]PEWT,

wherein x can be any amino acid.

[0177] Motifs 1 to 3 were derived using the MEME algorithm (Bailey and Elkan, Proceedings of the Second International Conference on Intelligent Systems for Molecular Biology, pp. 28-36, AAAI Press, Menlo Park, Calif., 1994). At each position within a MEME motif, the residues are shown that are present in the query set of sequences with a frequency higher than 0.2. Residues within square brackets represent alternatives.

[0178] Preferably, the ELM2-related polypeptide comprises in increasing order of preference, at least 2, or all 3 motifs.

[0179] Additionally or alternatively, the homologue of an ELM2-related protein has in increasing order of preference at least 9%, 10%, 11%, 12%, 13%, 14%, 15%, 16%, 17%, 18%, 19%, 20%, 21%, 22%, 23%, 24%, 25%, 26%, 27%, 28%, 29%, 30%, 31%, 32%, 33%, 34%, 35%, 36%, 37%, 38%, 39%, 40%, 41%, 42%, 43%, 44%, 45%, 46%, 47%, 48%, 49%, 50%, 51%, 52%, 53%, 54%, 55%, 56%, 57%, 58%, 59%, 60%, 61%, 62%, 63%, 64%, 65%, 66%, 67%, 68%, 69%, 70%, 71%, 72%, 73%, 74%, 75%, 76%, 77%, 78%, 79%, 80%, 81%, 82%, 83%, 84%, 85%, 86%, 87%, 88%, 89%, 90%, 91%, 92%, 93%, 94%, 95%, 96%, 97%, 98%, or 99% overall sequence identity to the polypeptide sequence represented by SEQ ID NO: 2 or SEQ ID NO: 4, provided that the homologous protein comprises any one or more of the motifs as outlined above. The overall sequence identity is determined using a global alignment algorithm, such as the Needleman Wunsch algorithm in the program GAP (GCG Wisconsin Package, Accelrys), preferably with default parameters and preferably with sequences of mature proteins (i.e. without taking into account secretion signals or transit peptides). In one embodiment the sequence identity level is determined by comparison of the polypeptide sequences over the entire length of the sequence of SEQ ID NO: 2 or SEQ ID NO: 4.

[0180] Compared to overall sequence identity, the sequence identity will generally be higher when only motifs are considered. Preferably the motifs in an ELM2-related polypeptide have, in increasing order of preference, at least 70%, 71%, 72%, 73%, 74%, 75%, 76%, 77%, 78%, 79%, 80%, 81%, 82%, 83%, 84%, 85%, 86%, 87%, 88%, 89%, 90%, 91%, 92%, 93%, 94%, 95%, 96%, 97%, 98%, or 99% sequence identity to any one or more of the motifs represented by SEQ ID NO: 93 to SEQ ID NO: 95 (Motifs 1 to 3), provided that at least one of the motifs as represented in SEQ ID NO: 93 to SEQ ID NO: 95 (Motifs 1 to 3) is present in the ELM2-related polypeptide.

[0181] In other words, in another embodiment a method is provided wherein said ELM2-related polypeptide comprises a motif with at least 70%, 71%, 72%, 73%, 74%, 75%, 76%, 77%, 78%, 79%, 80%, 81%, 82%, 83%, 84%, 85%, 86%, 87%, 88%, 89%, 90%, 91%, 92%, 93%, 94%, 95%, 96%, 97%, 98%, or 99% sequence identity to any of the motifs starting with amino acid 271 up to amino acid 320 in SEQ ID NO: 2, starting with amino acid 354 up to amino acid 388 in SEQ ID NO: 2 or starting with amino acid 220 up to amino acid 239 in SEQ ID NO: 2, provided the ELM2-related polypeptide comprises any one or more of the motifs as represented in SEQ ID NO: 93 to SEQ ID NO: 95 (Motifs 1 to 3).

[0182] The WRKY-related polypeptide as used herein comprises a ‘WRKYGQK’ motif that is invariant in most WRKY domains and the cysteine and histidine residues of the zinc-finger motif that is conserved in WRKY domains. Particularly, the WRKY-related polypeptide comprises the zinc-finger motif being a C2H2 zinc finger and comprising one or more WRKY motifs, preferably WRKYGQK′ motif. Further, the WRKY-related polypeptide comprises a basic motif resembling a large T-antigen-type nuclear localization signal (NLS).

[0183] Particularly, the basic motif is NLS comprising ‘KKAR’ motif. The WRKY-related polypeptide also comprises a coiled-coil motif, preferably a WRKY-specific coiled-coil structure, more preferably a putative type II WRKY-specific coiled-coil structure, identified by ‘coils’ at the N-termini, and bulky hydrophobic residues that form the characteristic heptad repeat pattern of coiled coils. The WRKY-related polypeptide as used herein may also comprise three motifs as described herein above and exemplified in FIG. 8.

[0184] Concerning the search of the motifs as used and defined herein, the information given in InterPro database as InterPro entry IPR003657 provides further information thereon: The WRKY domain is a 60 amino acid region that is defined by the conserved amino acid sequence WRKYGQK at its N-terminal end, together with a zinc-finger-like motif. The WRKY domain is found in one or two copies in a superfamily of plant transcription factors involved in the regulation of various physiological programs that are unique to plants, including pathogen defence, senescence, trichome development and the biosynthesis of secondary metabolites. The WRKY domain binds specifically to the DNA sequence motif (T)(T)TGAC(C/T), which is known as the W box. The invariant TGAC core of the W box is essential for function and WRKY binding.

[0185] Structural studies indicate that this domain is a four-stranded beta-sheet with a zinc binding pocket, forming a novel zinc and DNA binding structure. The WRKYGQK residues correspond to the most N-terminal beta-strand, which enables extensive hydrophobic interactions, contributing to the structural stability of the beta-sheet.

[0186] As used herein, the term “WRKY-related polypeptide” also intends to include homologues as defined hereunder of “WRKY-related polypeptide”.

[0187] Additionally or alternatively, the homologue of a WRKY-related polypeptide has in increasing order of preference at least 25%, 26%, 27%, 28%, 29%, 30%, 31%, 32%, 33%, 34%, 35%, 36%, 37%, 38%, 39%, 40%, 41%, 42%, 43%, 44%, 45%, 46%, 47%, 48%, 49%, 50%, 51%, 52%, 53%, 54%, 55%, 56%, 57%, 58%, 59%, 60%, 61%, 62%, 63%, 64%, 65%, 66%, 67%, 68%, 69%, 70%, 71%, 72%, 73%, 74%, 75%, 76%, 77%, 78%, 79%, 80%, 81%, 82%, 83%, 84%, 85%, 86%, 87%, 88%, 89%, 90%, 91%, 92%, 93%, 94%, 95%, 96%, 97%, 98%, or 99% overall sequence identity to the polypeptide sequence represented by SEQ ID NO: 103, provided that the homologous protein comprises any one or more of the conserved motifs as outlined above. The overall sequence identity is determined using a global alignment algorithm, such as the Needleman Wunsch algorithm in the program GAP (GCG Wisconsin Package, Accelrys), preferably with default parameters and preferably with sequences of mature proteins (i.e. without taking into account secretion signals or transit peptides). In one embodiment the sequence identity level is determined by comparison of the polypeptide sequences over the entire length of the sequence of SEQ ID NO: 103.

[0188] WRKY-related polypeptide as used herein has DNA-binding activity. Hybridising sequences useful in the methods of the invention encode a WRKY-related polypeptide as defined herein, having substantially the same biological activity as the polypeptide sequences given in Table A2 of the Examples section. Preferably, the hybridising sequence is capable of hybridising to the complement of any one of the nucleic acids given in Table A2 of the Examples section, or to a portion of any of these sequences, a portion being as defined above, or the hybridising sequence is capable of hybridising to the complement of a nucleic acid encoding an orthologue or paralogue of any one of the amino acid sequences given in Table A2 of the Examples section. Most preferably, the hybridising sequence is capable of hybridising to the complement of a nucleic acid as represented by SEQ ID NO: 102 or to a portion thereof. In one embodiment, the hybridization conditions are of medium stringency, preferably of high stringency, as defined above.

[0189] A “EMG1-like polypeptide” as defined herein refers to any polypeptide comprising an InterPro accession IPR005304 EMG1 domain corresponding to PFAM accession number PF03587. In a preferred embodiment, the EMG1-like polypeptide comprises an EMG1 domain having at least 60%, 61%, 62%, 63%, 64%, 65%, 66%, 67%, 68%, 69%, 70%, 71%, 72%, 73%, 74%, 75%, 76%, 77%, 78%, 79%, 80%, 81%, 82%, 83%, 84%, 85%, 86%, 87%, 88%, 89%, 90%, 91%, 92%, 93%, 94%, 95%, 96%, 97%, 98%, or 99% sequence identity with the EMG1 domain from amino acid 81 to 276 in SEQ ID NO: 179.

[0190] The term “EMG1-like” or “EMG1-like polypeptide” as used herein also intends to include homologues as defined hereunder of “EMG1-like polypeptide”.

[0191] Most preferably, the EMG1-like polypeptide further comprises one of the signature sequences or motifs represented by SEQ ID NO: 286, SEQ ID NO: 287 or SEQ ID NO: 288.

[0192] Motifs 4 to 6 were derived using the MEME algorithm (Bailey and Elkan, Proceedings of the Second International Conference on Intelligent Systems for Molecular Biology, pp. 28-36, AAAI Press, Menlo Park, Calif., 1994). At each position within a MEME motif, the residues are shown that are present in the query set of sequences with a frequency higher than 0.2. Residues within square brackets represent alternatives.

[0193] More preferably, the EMG1-like polypeptide comprises in increasing order of preference, at least 2, or all 3 motifs.

[0194] Additionally or alternatively, the homologue of a EMG1-like protein has in increasing order of preference at least 25%, 26%, 27%, 28%, 29%, 30%, 31%, 32%, 33%, 34%, 35%, 36%, 37%, 38%, 39%, 40%, 41%, 42%, 43%, 44%, 45%, 46%, 47%, 48%, 49%, 50%, 51%, 52%, 53%, 54%, 55%, 56%, 57%, 58%, 59%, 60%, 61%, 62%, 63%, 64%, 65%, 66%, 67%, 68%, 69%, 70%, 71%, 72%, 73%, 74%, 75%, 76%, 77%, 78%, 79%, 80%, 81%, 82%, 83%, 84%, 85%, 86%, 87%, 88%, 89%, 90%, 91%, 92%, 93%, 94%, 95%, 96%, 97%, 98%, or 99% overall sequence identity to the polypeptide sequence represented by SEQ ID NO: 179, provided that the homologous protein comprises any one or more of the conserved domains and/or motifs as outlined above. The overall sequence identity is determined using a global alignment algorithm, such as the Needleman Wunsch algorithm in the program GAP (GCG Wisconsin Package, Accelrys), preferably with default parameters and preferably with sequences of mature proteins (i.e. without taking into account secretion signals or transit peptides). In one embodiment the sequence identity level is determined by comparison of the polypeptide sequences over the entire length of the sequence of SEQ ID NO: 179.

[0195] Compared to overall sequence identity, the sequence identity will generally be higher when only conserved domains or motifs are considered. Preferably the motifs in a EMG1-like polypeptide have, in increasing order of preference, at least 70%, 71%, 72%, 73%, 74%, 75%, 76%, 77%, 78%, 79%, 80%, 81%, 82%, 83%, 84%, 85%, 86%, 87%, 88%, 89%, 90%, 91%, 92%, 93%, 94%, 95%, 96%, 97%, 98%, or 99% sequence identity to any one or more of the motifs represented by SEQ ID NO: 286 to SEQ ID NO: 288 (Motifs 4 to 6).

[0196] In other words, in another embodiment a method is provided wherein said EMG1-like polypeptide comprises a conserved motif with at least 70%, 71%, 72%, 73%, 74%, 75%, 76%, 77%, 78%, 79%, 80%, 81%, 82%, 83%, 84%, 85%, 86%, 87%, 88%, 89%, 90%, 91%, 92%, 93%, 94%, 95%, 96%, 97%, 98%, or 99% sequence identity to the conserved domain starting with amino acid 92 up to amino acid 141, amino acid 152 up to amino acid 201 and/or amino acid 232 up to amino acid 281 in SEQ ID NO: 179.

[0197] A “GPx-related polypeptide” as used and defined herein comprises peroxidase (Px) enzymes, particularly Glutathione peroxidise as described herein under Example 4. The GPx-related polypeptide” further comprises thioredoxin-like fold and/or thioredoxin fold protein as described herein under Example 4. Moreover, “GPx-related polypeptide” as used herein comprises twelve motifs and seven signatures as used and defined herein and further exemplified in FIG. 17.

[0198] According one embodiment, there is provided a method for improving yield-related traits as provided herein in plants relative to or compared to control plants, comprising modulating expression in a plant of a nucleic acid encoding a GPx-related polypeptide as defined herein.

[0199] In one embodiment, the GPx-related polypeptide as used herein comprises one or more of the following signatures 1 to 6:

Signature 1 (SEQ ID NO: 373):
G[K/R][L/V][I/L]LI[V/E/T]NVA[S/T/A][E/Q/L/Y][C/U]G
[L/T]T
Signature 2 (SEQ ID NO: 374):
VNVAS[R/K/Q]CG
Signature 3 (SEQ ID NO: 375):
VN[T/V]A[S/T/A][R/K/E/Q/A]CG
Signature 4 (SEQ ID NO: 376):
VN[T/V]AS[K/R/H/L/Q]C[G/S/A]
Signature 5 (SEQ ID NO: 377):
LAFPCNQF
Signature 6 (SEQ ID NO: 378):
WNF[S/T]KF

[0200] In another embodiment, the GPx-related polypeptide comprises in increasing order of preference, at least 2, at least 3, at least 4, at least 5, or all 6 signatures as defined herein.

[0201] Motifs 7 to 18 were derived using the MEME algorithm (Bailey and Elkan, Proceedings of the Second International Conference on Intelligent Systems for Molecular Biology, pp. 28-36, AAAI Press, Menlo Park, Calif., 1994). At each position within a MEME motif, the residues are shown that are present in the query set of sequences with a frequency higher than 0.2. Residues within square brackets represent alternatives.

[0202] In one embodiment, the GPx-related polypeptide as used herein comprises at least one of the motifs 7, 8 or 9.

Motif 7 (SEQ ID NO: 361): VN[V/A]AS[R/K/Q]CG
Motif 8 (SEQ ID NO: 362): L[A/G]FP[S/C]NQF
Motif 9 (SEQ ID NO: 363): WNF[S/T]KF

[0203] In a further embodiment, the GPx-related polypeptide as used herein comprises at least one of the motifs represented by Group A comprising motifs 10 to 12:

Group A
Motif 10 (SEQ ID NO: 364):
EILAFPCNQFGGQEPG[S/T]NE[E/Q]I[V/Q][Q/E]
Motif 11 (SEQ ID NO: 365):
CTRFKAE[Y/F]PIFDKVDVNG[D/N]N[A/T]AP[L/I]YKFLKSSKGG
Motif 12 (SEQ ID NO: 366):
IKWNF[S/T]KFLVDK[E/D]G[N/H/R]W[D/E]RYAPTTSPLS[I/M]

[0204] In a further embodiment, the GPx-related polypeptide as used herein comprises at least one of the motifs represented by Group B comprising motifs 13 to 15:

Group B
Motif 13 (SEQ ID NO: 367):
GKVL[L/I]IVNVASQCGLTNSNYT[E/D][L/M][T/S][Q/E]LYEKY
KDQG[L/F]EILAFPCNQFGGQEP
Motif 14 (SEQ ID NO: 368):
CTRFKAE[Y/F]PIFDKVDVNGDN[A/T]AP[L/I]YKFLKSSKGG
Motif 15 (SEQ ID NO: 369):
FGD[S/G/N]IKWNF[S/T]KFLVDK[E/D]G[N/K/R]VV[D/E]RYAP
TTSP[L/A]S[I/M]EKD[I/V]KKLL

[0205] In a further embodiment, the GPX-related polypeptide as used herein comprises at least one of the motifs represented by Group C comprising motifs 16 to 18:

Group C
Motif 16 (SEQ ID NO: 370):
FEILAFPCNQFGGQEPGTNEEIVQFACTRFKAEYPIFDKVDVNG
Motif 17 (SEQ ID NO: 371):
P[I/L]YKFLKSSKG[G/S]LFG[D/E][S/N]IKWNFSKFLVDKEG
[H/R]VV[D/E]RYAPTTSPLS[I/M]EKDI
Motif 18 (SEQ ID NO: 372):
VHDFTVKDASGKDVDLS[T/V][Y/F]KGKVLLIVNVASQ

[0206] In still another embodiment, the GPx-related polypeptide comprises in increasing order of preference, at least 2, at least 3, at least 4, at least 5, at least 6, at least 7, at least 8, at least 9, at least 10, at least 11, or all 12 motifs as defined herein.

[0207] Additionally or alternatively, the GPx-related polypeptide or protein has in increasing order of preference at least 25%, 26%, 27%, 28%, 29%, 30%, 31%, 32%, 33%, 34%, 35%, 36%, 37%, 38%, 39%, 40%, 41%, 42%, 43%, 44%, 45%, 46%, 47%, 48%, 49%, 50%, 51%, 52%, 53%, 54%, 55%, 56%, 57%, 58%, 59%, 60%, 61%, 62%, 63%, 64%, 65%, 66%, 67%, 68%, 69%, 70%, 71%, 72%, 73%, 74%, 75%, 76%, 77%, 78%, 79%, 80%, 81%, 82%, 83%, 84%, 85%, 86%, 87%, 88%, 89%, 90%, 91%, 92%, 93%, 94%, 95%, 96%, 97%, 98%, or 99% overall sequence identity to the polypeptide sequence represented by SEQ ID NO: 293, 295 or 297, provided that the homologous protein comprises any one or more of the conserved motifs as outlined above. The overall sequence identity is determined using a global alignment algorithm, such as the Needleman Wunsch algorithm in the program GAP (GCG Wisconsin Package, Accelrys), preferably with default parameters and preferably with sequences of mature proteins (i.e. without taking into account secretion signals or transit peptides). In one embodiment the sequence identity level is determined by comparison of the polypeptide sequences over the entire length of the sequence of SEQ ID NO: 293, 295 or 297.

[0208] In another embodiment, the sequence identity level is determined by comparison of one or more conserved domains or motifs in SEQ ID NO: 293, 295 or 297 with corresponding conserved domains or motifs in other GPx-related polypeptides. Compared to overall sequence identity, the sequence identity will generally be higher when only conserved domains or motifs are considered. Preferably the motifs in a GPx-related polypeptide have, in increasing order of preference, at least 70%, 71%, 72%, 73%, 74%, 75%, 76%, 77%, 78%, 79%, 80%, 81%, 82%, 83%, 84%, 85%, 86%, 87%, 88%, 89%, 90%, 91%, 92%, 93%, 94%, 95%, 96%, 97%, 98%, or 99% sequence identity to any one or more of the motifs represented by SEQ ID NO: 361 to SEQ ID NO: 378 (Motifs 7 to 18, Signatures 1 to 6).

[0209] The terms “domain”, “signature” and “motif” are defined in the “definitions” section herein.

[0210] With respect to ELM2-related polypeptides, the polypeptide sequence which when used in the construction of a phylogenetic tree, such as the one depicted in FIG. 4, preferably clusters with the group of ELM2-related polypeptides (in bold) comprising the amino acid sequence represented by SEQ ID NO: 2, indicated as Poptr_ELM2-related, rather than with any other group.

[0211] Furthermore, ELM2-related polypeptides, at least in their native form, typically have transcriptional repression activity, involved in inhibiting chromatin remodeling. Tools and techniques for measuring such activity are well known in the art and e.g. described in Ding et al., Mol. Cell Biol. 2003 January; 23(1):250-8.

[0212] In addition, ELM2-related polypeptides, when expressed in rice according to the methods of the present invention as outlined in Examples 7 and 8, give plants having increased yield related traits, in particular increased biomass and increased seed yield with amongst others increased total weight of seeds, increased number of (filled) seeds, increased fill rate, increased harvest index, increased number of florets.

[0213] In one embodiment of the present invention the function of the nucleic acid sequences of the invention is to confer information for synthesis of the ELM2-related polypeptide that increases yield or yield related traits, when such a nucleic acid sequence of the invention is transcribed and translated in a living plant cell.

[0214] With respect to WRKY-related polypeptides, in addition, WRKY-related polypeptides, when expressed in rice according to the methods of the present invention as outlined in Examples 7 and 8, give plants having increased yield related traits, in particular one or more of emergence vigour (early vigour), total seed yield (Totalwgseeds), fillrate, TKW, number of filled seeds, taller more erect plants (HeightMax), amount of thick roots (RootThickMax). Moreover, one or more lines showed in one or more parameters an increase of number of florets per panicle on a plant (flowerperpan), increased harvestindex (HI), increased greenness of a plant before flowering (GNbfFlow), increased height of the plant (GravityYMax), increased quick early development (AreaEmer), increased Cycle Time (AreaCycl).

[0215] In one embodiment of the present invention the function of the nucleic acid sequences of the invention is to confer information for synthesis of the WRKY-related polypeptide that increases yield or yield related traits, when such a nucleic acid sequence of the invention is transcribed and translated in a living plant cell.

[0216] With respect to EMG1-like polypeptides, the polypeptide sequence which when used in the construction of a phylogenetic tree, such as the one depicted in FIG. 13, preferably clusters with the group of EMG1-like polypeptides comprising the amino acid sequence represented by SEQ ID NO: 179, indicated as P. trichocarpa EMG1-like, rather than with any other group.

[0217] Furthermore, EMG1-like polypeptides, at least in their native form, typically have RNA binding activity as e.g. described by Leulliot et al., Nucleic acid Res. 2008, 36(2), 629-39.

[0218] In addition, EMG1-like polypeptides, when expressed in rice according to the methods of the present invention as outlined in Examples 7 and 8, give plants having increased yield related traits, in particular seed yield, such as increased total seed weight, increased harvest index and increased fill rate.

[0219] In one embodiment of the present invention the function of the nucleic acid sequences of the invention is to confer information for synthesis of the EMG1-like polypeptide that increases yield or yield related traits, when such a nucleic acid sequence of the invention is transcribed and translated in a living plant cell.

[0220] With respect to GPx-related polypeptides, the polypeptide sequence which when used in the construction of a phylogenetic tree, such as the one depicted in FIG. 21, preferably clusters with the group of GPx-related polypeptides comprising the amino acid sequence represented by SEQ ID NO: 293, 295 or 297 rather than with any other group.

[0221] Furthermore, GPx-related polypeptides (at least in their native form) typically have enzymatic activity, particularly peroxidase activity. Tools and techniques for measuring enzymatic activity, particularly peroxidase activity are known in the art. In addition, nucleic acids encoding GPx-related polypeptides, when expressed in rice according to the methods of the present invention as outlined in Examples 7 and 8, give plants having increased yield related traits, in particular seed yield, seed size, number total seeds, fillrate, number of filled seeds as well as flowering time. Another function of the nucleic acid sequences encoding GPx-related polypeptides is to confer information for synthesis of the GPx-related protein that increases yield or yield related traits as described herein, when such a nucleic acid sequence of the invention is transcribed and translated in a living plant cell.

[0222] With respect to ELM2-related polypeptides, the present invention is illustrated by transforming plants with the nucleic acid sequence represented by SEQ ID NO: 1, encoding the polypeptide sequence of SEQ ID NO: 2, and by transforming plants with the nucleic acid sequence represented by SEQ ID NO: 3, encoding the polypeptide sequence of SEQ ID NO: 4. However, performance of the invention is not restricted to these sequences; the methods of the invention may advantageously be performed using any ELM2-related-encoding nucleic acid or ELM2-related polypeptide as defined herein.

[0223] Further examples of nucleic acids encoding ELM2-related polypeptides are given in Table A1 of the Examples section herein. Such nucleic acids are useful in performing the methods of the invention. The polypeptide sequences given in Table A1 of the Examples section are example sequences of orthologues and paralogues of the ELM2-related polypeptide represented by SEQ ID NO: 2, the terms “orthologues” and “paralogues” being as defined herein. Further orthologues and paralogues may readily be identified by performing a so-called reciprocal blast search as described in the definitions section; where the query sequence is SEQ ID NO: 1 or SEQ ID NO: 2, the second BLAST (back-BLAST) would be against Populus trichocarpa sequences or where the query sequence is SEQ ID NO: 3 or SEQ ID NO: 4, the second BLAST (back-BLAST) would be against Medicago truncatula.

[0224] In a further preferred embodiment, a method is provided wherein said ELM2-related polypeptide comprises an Interpro accession IPR 000949, according to PFAM accession number PF01448 ELM2 domain.

[0225] In another embodiment a method is provided wherein said ELM2-related polypeptide comprises an ELM2 domain with at least 30%, 31%, 32%, 33%, 34%, 35%, 36%, 37%, 38%, 39%, 40%, 41%, 42%, 43%, 44%, 45%, 46%, 47%, 48%, 49%, 50%, 51%, 52%, 53%, 54%, 55%, 56%, 57%, 58%, 59%, 60%, 61%, 62%, 63%, 64%, 65%, 66%, 67%, 68%, 69%, 70%, 71%, 72%, 73%, 74%, 75%, 76%, 77%, 78%, 79%, 80%, 81%, 82%, 83%, 84%, 85%, 86%, 87%, 88%, 89%, 90%, 91%, 92%, 93%, 94%, 95%, 96%, 97%, 98%, or 99% sequence identity to the ELM2 domain starting with amino acid 225 up to amino acid 262 in SEQ ID NO: 2.

[0226] In another preferred embodiment, a method is provided wherein said nucleic acid encodes the polypeptide represented by any one of SEQ ID NO: 2 or SEQ ID NO: 4 or a homologue thereof which has at least 90% overall sequence identity to SEQ ID NO: 2 or SEQ ID NO: 4.

[0227] According to a further embodiment of the present invention, there is therefore provided an isolated nucleic acid molecule selected from:
[0228] (i) a nucleic acid encoding an ELM2-related polypeptide having in increasing order of preference at least 50%, 51%, 52%, 53%, 54%, 55%, 56%, 57%, 58%, 59%, 60%, 61%, 62%, 63%, 64%, 65%, 66%, 67%, 68%, 69%, 70%, 71%, 72%, 73%, 74%, 75%, 76%, 77%, 78%, 79%, 80%, 81%, 82%, 83%, 84%, 85%, 86%, 87%, 88%, 89%, 90%, 91%, 92%, 93%, 94%, 95%, 96%, 97%, 98%, or 99% sequence identity to the polypeptide sequence represented by SEQ ID NO: 2, provided the ELM2-related polypeptide comprises any one or more of the motifs as represented in SEQ ID NO: 93 to SEQ ID NO: 95 (Motifs 1 to 3), and additionally or alternatively comprising one or more motifs having in increasing order of preference at least 50%, 55%, 60%, 65%, 70%, 75%, 80%, 85%, 90%, 95%, 96%, 97%, 98%, 99% or more sequence identity to any one or more of the motifs given in SEQ ID NO: 93 to SEQ ID NO: 95, and further preferably conferring enhanced yield-related traits relative to control plants.
[0229] (ii) a nucleic acid molecule which hybridizes with a nucleic acid molecule of (i) to (iii) under high stringency hybridization conditions and preferably confers enhanced yield-related traits relative to control plants.

[0230] According to a further embodiment of the present invention, there is also provided an isolated polypeptide selected from:
[0231] (i) an amino acid sequence having, in increasing order of preference, at least 50%, 51%, 52%, 53%, 54%, 55%, 56%, 57%, 58%, 59%, 60%, 61%, 62%, 63%, 64%, 65%, 66%, 67%, 68%, 69%, 70%, 71%, 72%, 73%, 74%, 75%, 76%, 77%, 78%, 79%, 80%, 81%, 82%, 83%, 84%, 85%, 86%, 87%, 88%, 89%, 90%, 91%, 92%, 93%, 94%, 95%, 96%, 97%, 98%, or 99% sequence identity to the polypeptide sequence represented by SEQ ID NO: 2, provided the ELM2-related polypeptide comprises any one or more of the motifs as represented in SEQ ID NO: 93 to SEQ ID NO: 95 (Motifs 1 to 3), and additionally or alternatively comprising one or more motifs having in increasing order of preference at least 50%, 55%, 60%, 65%, 70%, 75%, 80%, 85%, 90%, 95%, 96%, 97%, 98%, 99% or more sequence identity to any one or more of the motifs given in SEQ ID NO: 93 to SEQ ID NO: 95, and further preferably conferring enhanced yield-related traits relative to control plants;
[0232] (ii) derivatives of any of the amino acid sequences given in (i) above.

[0233] With respect to WRKY-related polypeptides, the present invention is illustrated by transforming plants with the nucleic acid sequence represented by SEQ ID NO: 102, encoding the polypeptide sequence of SEQ ID NO: 103. However, performance of the invention is not restricted to these sequences; the methods of the invention may advantageously be performed using any WRKY-related polypeptide-encoding nucleic acid or WRKY-related polypeptide as defined herein.

[0234] Examples of nucleic acids encoding WRKY-related polypeptides are given in Table A2 of the Examples section herein. Such nucleic acids are useful in performing the methods of the invention. The polypeptide sequences given in Table A2 of the Examples section are example sequences of orthologues and paralogues of the WRKY-related polypeptide represented by SEQ ID NO: 103, the terms “orthologues” and “paralogues” being as defined herein. Further orthologues and paralogues may readily be identified by performing a so-called reciprocal blast search as described in the definitions section.

[0235] With respect to EMG1-like polypeptides, the present invention is illustrated by transforming plants with the nucleic acid sequence represented by SEQ ID NO: 178, encoding the polypeptide sequence of SEQ ID NO: 179. However, performance of the invention is not restricted to these sequences; the methods of the invention may advantageously be performed using any EMG1-like-encoding nucleic acid or EMG1-like polypeptide as defined herein.

[0236] Examples of nucleic acids encoding EMG1-like polypeptides are given in Table A3 of the Examples section herein. Such nucleic acids are useful in performing the methods of the invention. The polypeptide acid sequences given in Table A3 of the Examples section are example sequences of orthologues and paralogues of the EMG1-like polypeptide represented by SEQ ID NO: 179, the terms “orthologues” and “paralogues” being as defined herein. Further orthologues and paralogues may readily be identified by performing a so-called reciprocal blast search as described in the definitions section; where the query sequence is SEQ ID NO: 178 or SEQ ID NO: 179, the second BLAST (back-BLAST) would be against Populus trichocarpa sequences.

[0237] With respect to GPx-related polypeptides, the present invention is illustrated by transforming plants with the nucleic acid sequence represented by SEQ ID NOs 292, 294 and 296 encoding the polypeptide sequence of SEQ ID NO: 293, 295 and 297, respectively. However, performance of the invention is not restricted to these sequences; the methods of the invention may advantageously be performed using any GPx-related-encoding nucleic acid or GPx-related polypeptide as defined herein. The term “GPx-related” or “GPx-related polypeptide” as used herein also intends to include homologues as defined hereunder of SEQ ID NO: 293, 295 or 297.

[0238] Examples of nucleic acids encoding GPx-related polypeptides are given in Table A4 of the Examples section herein. Such nucleic acids are useful in performing the methods of the invention. The polypeptide sequences given in Table A4 of the Examples section are example sequences of orthologues and paralogues of the GPx-related polypeptide represented by SEQ ID NO: 293, 295 or 297, the terms “orthologues” and “paralogues” being as defined herein. Further orthologues and paralogues may readily be identified by performing a so-called reciprocal blast search as described in the definitions section.

[0239] The invention also provides hitherto unknown GPx-related-encoding nucleic acids and GPx-related polypeptides useful for conferring enhanced yield-related traits in plants relative to or compared to control plants.

[0240] Nucleic acid variants may also be useful in practising the methods of the invention. Examples of such variants include nucleic acids encoding homologues and derivatives of any one of the amino acid sequences given in Table A1 to A4 of the Examples section, the terms “homologue” and “derivative” being as defined herein. Also useful in the methods, constructs, plants, harvestable parts and products of the invention are nucleic acids encoding homologues and derivatives of orthologues or paralogues of any one of the amino acid sequences given in Table A1 to A4 of the Examples section. Homologues and derivatives useful in the methods of the present invention have substantially the same biological and functional activity as the unmodified protein from which they are derived. Further variants useful in practicing the methods of the invention are variants in which codon usage is optimised or in which miRNA target sites are removed.

[0241] Further nucleic acid variants useful in practicing the methods of the invention include portions of nucleic acids encoding ELM2-related polypeptides, or WRKY-related polypeptides, or EMG1-like polypeptides, or GPx-related polypeptides, nucleic acids hybridising to nucleic acids encoding ELM2-related polypeptides, or WRKY-related polypeptides, or EMG1-like polypeptides, or GPx-related polypeptides, splice variants of nucleic acids encoding ELM2-related polypeptides, or WRKY-related polypeptides, or EMG1-like polypeptides, or GPx-related polypeptides, allelic variants of nucleic acids encoding ELM2-related polypeptides, or WRKY-related polypeptides, or EMG1-like polypeptides, or GPx-related polypeptides and variants of nucleic acids encoding ELM2-related polypeptides, or WRKY-related polypeptides, or EMG1-like polypeptides, or GPx-related polypeptides, obtained by gene shuffling. The terms hybridising sequence, splice variant, allelic variant and gene shuffling are as described herein.

[0242] Nucleic acids encoding ELM2-related polypeptides, or WRKY-related polypeptides, or EMG1-like polypeptides, or GPx-related polypeptides, need not be full-length nucleic acids, since performance of the methods of the invention does not rely on the use of full-length nucleic acid sequences. According to the present invention, there is provided a method for enhancing yield-related traits in plants, comprising introducing and expressing in a plant a portion of any one of the nucleic acid sequences given in Table A1 to A4 of the Examples section, or a portion of a nucleic acid encoding an orthologue, paralogue or homologue of any of the amino acid sequences given in Table A1 to A4 of the Examples section.

[0243] A portion of a nucleic acid may be prepared, for example, by making one or more deletions to the nucleic acid. The portions may be used in isolated form or they may be fused to other coding (or non-coding) sequences in order to, for example, produce a protein that combines several activities. When fused to other coding sequences, the resultant polypeptide produced upon translation may be bigger than that predicted for the protein portion.

[0244] With respect to the ELM2-related polypeptides, portions useful in the methods, constructs, plants, harvestable parts and products of the invention, encode an ELM2-related polypeptide as defined herein, and have substantially the same biological activity as the amino acid sequences given in Table A1 of the Examples section. Preferably, the portion is a portion of any one of the nucleic acids given in Table A1 of the Examples section, or is a portion of a nucleic acid encoding an orthologue or paralogue of any one of the amino acid sequences given in Table A1 of the Examples section. Preferably the portion is at least 400, 450, 500, 550, 600, 650, 700, 750, 800, 850, 900, 950, 1000, 1050, 1100, 1150, 1200, 1250, 1300, 1350, 1400, 1450, 1500, 1550, 1600, 1650, 1700, 1750, 1800, 1850, 1900, 1950, 2000, 2050, 2100, 2150, 2200, 2250, 2300, 2350, 2400, 2450, 2500, 2550, 2600, 2650, 2700, 2750, 2800, 2850, 2900 consecutive nucleotides in length, the consecutive nucleotides being of any one of the nucleic acid sequences given in Table A1 of the Examples section, or of a nucleic acid encoding an orthologue or paralogue of any one of the amino acid sequences given in Table A1 of the Examples section. Most preferably the portion is a portion of the nucleic acid of SEQ ID NO: 1 or a portion of the nucleic acid of SEQ ID NO: 3. Preferably, the portion encodes a fragment of an amino acid sequence which, when used in the construction of a phylogenetic tree, such as the one depicted in FIG. 4, clusters with the group of ELM2-related polypeptides as indicated in bold, comprising the amino acid sequences represented by SEQ ID NO: 2 and 4, rather than with any other group, and comprises any one or more of the motifs as represented by SEQ ID NO: 93 to SEQ ID NO: 95, and/or has transcriptional repression biological activity, and/or has at least 9% sequence identity to SEQ ID NO: 2.

[0245] With respect to WRKY-related polypeptides, portions useful in the methods, constructs, plants, harvestable parts and products of the invention, encode a WRKY-related polypeptide as defined herein, and have substantially the same biological activity as the amino acid sequences given in Table A2 of the Examples section. Preferably, the portion is a portion of any one of the nucleic acids given in Table A2 of the Examples section, or is a portion of a nucleic acid encoding an orthologue or paralogue of any one of the amino acid sequences given in Table A2 of the Examples section. Preferably the portion is at least 500, 550, 600, 650, 700, 750, 800, 850, 900, 950, 1000, 1050, 1100, 1150, 1200, 1250, 1300, 1450, 1500, 1550, 1600, 1650, 1700, 1750, 1800, 1850, 1900, 1950, 2000 consecutive nucleotides in length, the consecutive nucleotides being of any one of the nucleic acid sequences given in Table A2 of the Examples section, or of a nucleic acid encoding an orthologue or paralogue of any one of the amino acid sequences given in Table A2 of the Examples section. Most preferably the portion is a portion of the nucleic acid of SEQ ID NO: 102.

[0246] With respect to EMG1-like polyeptides, portions useful in the methods, constructs, plants, harvestable parts and products of the invention, encode a EMG1-like polypeptide as defined herein, and have substantially the same biological activity as the amino acid sequences given in Table A3 of the Examples section. Preferably, the portion is a portion of any one of the nucleic acids given in Table A3 of the Examples section, or is a portion of a nucleic acid encoding an orthologue or paralogue of any one of the amino acid sequences given in Table A3 of the Examples section. Preferably the portion is at least 500, 550, 600, 650, 700, 750, 800, 850, 900, 950, 1000, 1050, 1100, 1150, 1200, 1250, 1300, 1350, 1400, 1450, 1500, 1550, 1600 consecutive nucleotides in length, the consecutive nucleotides being of any one of the nucleic acid sequences given in Table A3 of the Examples section, or of a nucleic acid encoding an orthologue or paralogue of any one of the amino acid sequences given in Table A3 of the Examples section. Most preferably the portion is a portion of the nucleic acid of SEQ ID NO: 178. Preferably, the portion encodes a fragment of an amino acid sequence which, when used in the construction of a phylogenetic tree, such as the one depicted in FIG. 13, clusters with the group of EMG1-like polypeptides comprising the amino acid sequence represented by SEQ ID NO: 179, indicated as P. trichocarpa EMG1-like, rather than with any other group, and/or comprises any of the motifs 4 to 6, and/or has RNA binding activity, and/or has at least 80% sequence identity to SEQ ID NO: 179.

[0247] With respect to GPx-related polypeptides, portions useful in the methods, constructs, plants, harvestable parts and products of the invention, encode a GPx-related polypeptide as defined herein or at least part thereof, and have substantially the same biological activity as the amino acid sequences given in Table A4 of the Examples section. Preferably, the portion is a portion of any one of the nucleic acids given in Table A4 of the Examples section, or is a portion of a nucleic acid encoding an orthologue or paralogue of any one of the amino acid sequences given in Table A4 of the Examples section. Preferably the portion is at least 500, 550, 600, 650, 700, 750, 800, 850, 900, 950, 1000 consecutive nucleotides in length, the consecutive nucleotides being of any one of the nucleic acid sequences given in Table A4 of the Examples section, or of a nucleic acid encoding an orthologue or paralogue of any one of the amino acid sequences given in Table A4 of the Examples section. Most preferably the portion is a portion of the nucleic acid of SEQ ID NO: 292, 294 or 296. Preferably, the portion encodes a fragment of an amino acid sequence which comprises one or more motifs selected from a group consisting of motifs 7 to 18 as defined herein and/or one or more signatures 1 to 6 as defined herein, and/or has biological activity particularly enzymatic activity, more particularly peroxidase activity, and/or has at least 50% sequence identity to SEQ ID NO: 293, 295 or 297.

[0248] Another nucleic acid variant useful in the methods, constructs, plants, harvestable parts and products of the invention is a nucleic acid capable of hybridising, under reduced stringency conditions, preferably under stringent conditions, with a nucleic acid encoding an ELM2-related polypeptide, or a WRKY-related polypeptide, or an EMG1-like polypeptide, or a GPx-related polypeptide, as defined herein, or with a portion as defined herein. According to the present invention, there is provided a method for enhancing yield-related traits in plants, comprising introducing and expressing in a plant a nucleic acid capable of hybridizing to the complement of a nucleic acid encoding any one of the proteins given in Table A1 to A4 of the Examples section, or to the complement of a nucleic acid encoding an orthologue, paralogue or homologue of any one of the proteins given in Table A1 to A4 of the Examples section.

[0249] Hybridising sequences useful in the methods, constructs, plants, harvestable parts and products of the invention encode an ELM2-related polypeptide, or a WRKY-related polypeptide, or an EMG1-like polypeptide, or a GPx-related polypeptide, as defined herein, having substantially the same biological activity as the amino acid sequences given in Table A1 to A4 of the Examples section. Preferably, the hybridising sequence is capable of hybridising to the complement of a nucleic acid encoding any one of the proteins given in Table A1 to A4 of the Examples section, or to a portion of any of these sequences, a portion being as defined herein, or the hybridising sequence is capable of hybridising to the complement of a nucleic acid encoding an orthologue or paralogue of any one of the amino acid sequences given in Table A1 to A4 of the Examples section.

[0250] With respect to ELM2-related polypeptides, the hybridising sequence is most preferably capable of hybridising to the complement of a nucleic acid as represented by SEQ ID NO: 1 or to a portion thereof. In one embodiment, the hybridization conditions are of medium stringency, preferably of high stringency, as defined above.

[0251] Preferably, the hybridising sequence encodes a polypeptide with an amino acid sequence which, when full-length and used in the construction of a phylogenetic tree, such as the one depicted in FIG. 4, clusters with the group of ELM2-related polypeptides as indicated in bold, comprising the amino acid sequences represented by SEQ ID NO: 2 and 4, rather than with any other group, and comprises any one or more of the motifs as represented by SEQ ID NO: 93 to SEQ ID NO: 95, and/or has transcriptional repression biological activity, and/or has at least 9% sequence identity to SEQ ID NO: 2.

[0252] With respect to WRKY-related polypeptides, the hybridising sequence most preferably is capable of hybridising to the complement of a nucleic acid as represented by SEQ ID NO: 102 or to a portion thereof. In one embodiment, the hybridization conditions are of medium stringency, preferably of high stringency, as defined above.

[0253] With respect to EMG1-like polypeptides, the hybridising sequence most preferably is capable of hybridising to the complement of a nucleic acid as represented by SEQ ID NO: 178 or to a portion thereof. In one embodiment, the hybridization conditions are of medium stringency, preferably of high stringency, as defined above.

[0254] Preferably, the hybridising sequence encodes a polypeptide with an amino acid sequence which, when full-length and used in the construction of a phylogenetic tree, such as the one depicted in FIG. 13, clusters with the group of EMG1-like polypeptides comprising the amino acid sequence represented by SEQ ID NO: 179, indicated as P. trichocarpa EMG1-like, rather than with any other group, and/or comprises any of the motifs 4 to 6, and/or has RNA binding activity, and/or has at least 80% sequence identity to SEQ ID NO: 179.

[0255] With respect to GPx-related polypeptides, the hybridising sequence is most preferably capable of hybridising to the complement of a nucleic acid encoding the polypeptide as represented by SEQ ID NO: 293, 295 or 297 or to a portion thereof. In one embodiment, the hybridization conditions are of medium stringency, preferably of high stringency, as defined herein.

[0256] Preferably, the hybridising sequence encodes a polypeptide with an amino acid sequence which comprises one or more motifs selected from a group consisting of motifs 7 to 18 as defined herein and/or one or more signatures 1 to 6 as defined herein, and/or has biological activity particularly enzymatic activity, more particularly peroxidase activity, and/or has at least 50% sequence identity to SEQ ID NO: 293, 295 or 297.

[0257] Another nucleic acid variant useful in the methods of the invention is a splice variant encoding an ELM2-related polypeptide, or a WRKY-related polypeptide, or an EMG1-like polypeptide, or a GPx-related polypeptide, as defined hereinabove, a splice variant being as defined herein.

[0258] In another embodiment, there is provided a method for enhancing yield-related traits in plants, comprising introducing and expressing in a plant a splice variant of a nucleic acid encoding any one of the proteins given in Table A1 to A4 of the Examples section, or a splice variant of a nucleic acid encoding an orthologue, paralogue or homologue of any of the amino acid sequences given in Table A1 to A4 of the Examples section.

[0259] With respect to ELM2-related polypeptides, preferred splice variants are splice variants of a nucleic acid represented by SEQ ID NO: 1, or a splice variant of a nucleic acid encoding an orthologue or paralogue of SEQ ID NO: 2. Preferably, the amino acid sequence encoded by the splice variant, when used in the construction of a phylogenetic tree, such as the one depicted in FIG. 4, clusters with the group of ELM2-related polypeptides as indicated in bold, comprising the amino acid sequences represented by SEQ ID NO: 2 and 4, rather than with any other group, and comprises any one or more of the motifs as represented by SEQ ID NO: 93 to SEQ ID NO: 95, and/or has transcriptional repression biological activity, and/or has at least 9% sequence identity to SEQ ID NO: 2.

[0260] With respect to WRKY-related polypeptides, preferred splice variants are splice variants of a nucleic acid represented by SEQ ID NO: 102, or a splice variant of a nucleic acid encoding an orthologue or paralogue of SEQ ID NO: 103.

[0261] With respect to EMG1-like polypeptides, preferred splice variants are splice variants of a nucleic acid represented by SEQ ID NO: 178, or a splice variant of a nucleic acid encoding an orthologue or paralogue of SEQ ID NO: 179. Preferably, the amino acid sequence encoded by the splice variant, when used in the construction of a phylogenetic tree, such as the one depicted in FIG. 13, clusters with the group of EMG1-like polypeptides comprising the amino acid sequence represented by SEQ ID NO: 179 rather than with any other group, and/or comprises any of the motifs 4 to 6, and/or has RNA binding activity, and/or has at least 80% sequence identity to SEQ ID NO: 179.

[0262] With respect to GPx-related polypeptides, preferred splice variants are splice variants of a nucleic acid represented by SEQ ID NO: 292, 294 or 296, or a splice variant of a nucleic acid encoding an orthologue or paralogue of SEQ ID NO: 293. Preferably, the amino acid sequence encoded by the splice variant comprises one or more motifs selected from a group consisting of motifs 7 to 18 as defined herein and/or one or more signatures 1 to 6 as defined herein, and/or has biological activity particularly enzymatic activity, more particularly peroxidase activity, and/or has at least 50% sequence identity to SEQ ID NO: 293, 295 or 297.

[0263] Another nucleic acid variant useful in performing the methods of the invention is an allelic variant of a nucleic acid encoding an ELM2-related polypeptide, or a WRKY-related polypeptide, or an EMG1-like polypeptide, or a GPx-related polypeptide, as defined hereinabove, an allelic variant being as defined herein.

[0264] In yet another embodiment, there is provided a method for enhancing yield-related traits in plants, comprising introducing and expressing in a plant an allelic variant of a nucleic acid encoding any one of the proteins given in Table A1 to A4 of the Examples section, or comprising introducing and expressing in a plant an allelic variant of a nucleic acid encoding an orthologue, paralogue or homologue of any of the amino acid sequences given in Table A1 to A4 of the Examples section.

[0265] With respect to ELM2-related polypeptides, the polypeptides encoded by allelic variants useful in the methods of the present invention have substantially the same biological activity as the ELM2-related polypeptide of SEQ ID NO: 2 and any of the amino acids depicted in Table A1 of the Examples section. Allelic variants exist in nature, and encompassed within the methods of the present invention is the use of these natural alleles. Preferably, the allelic variant is an allelic variant of SEQ ID NO: 1 or an allelic variant of a nucleic acid encoding an orthologue or paralogue of SEQ ID NO: 2. Preferably, the amino acid sequence encoded by the allelic variant, when used in the construction of a phylogenetic tree, such as the one depicted in FIG. 4, clusters with the group of ELM2-related polypeptides as indicated in bold, comprising the amino acid sequences represented by SEQ ID NO: 2 and 4, rather than with any other group, and comprises any one or more of the motifs as represented by SEQ ID NO: 93 to SEQ ID NO: 95, and/or has transcriptional repression biological activity, and/or has at least 9% sequence identity to SEQ ID NO: 2.

[0266] With respect to WRKY-related polypeptides, the polypeptides encoded by allelic variants useful in the methods of the present invention have substantially the same biological activity as the WRKY-related polypeptide of SEQ ID NO: 103 and any of the amino acids depicted in Table A2 of the Examples section. Allelic variants exist in nature, and encompassed within the methods of the present invention is the use of these natural alleles. Preferably, the allelic variant is an allelic variant of SEQ ID NO: 102 or an allelic variant of a nucleic acid encoding an orthologue or paralogue of SEQ ID NO: 103.

[0267] With respect to EMG1-like polypeptides, the polypeptides encoded by allelic variants useful in the methods of the present invention have substantially the same biological activity as the EMG1-like polypeptide of SEQ ID NO: 179 and any of the amino acids depicted in Table A3 of the Examples section. Allelic variants exist in nature, and encompassed within the methods of the present invention is the use of these natural alleles. Preferably, the allelic variant is an allelic variant of SEQ ID NO: 178 or an allelic variant of a nucleic acid encoding an orthologue or paralogue of SEQ ID NO: 179. Preferably, the amino acid sequence encoded by the allelic variant, when used in the construction of a phylogenetic tree, such as the one depicted in FIG. 13, clusters with the group of EMG1-like polypeptides comprising the amino acid sequence represented by SEQ ID NO: 179 rather than with any other group, and/or comprises any of the motifs 4 to 6, and/or has RNA binding activity, and/or has at least 80% sequence identity to SEQ ID NO: 179.

[0268] With respect to GPx-related polypeptides, the polypeptides encoded by allelic variants useful in the methods of the present invention have substantially the same biological activity as the GPx-related polypeptide of SEQ ID NO: 293, 295, or 297 and any of the amino acid sequences depicted in Table A4 of the Examples section. Allelic variants exist in nature, and encompassed within the methods of the present invention is the use of these natural alleles. Preferably, the allelic variant is an allelic variant of SEQ ID NO: 292, 294 or 296 or an allelic variant of a nucleic acid encoding an orthologue or paralogue of SEQ ID NO: 293, 295, or 297. Preferably, the amino acid sequence encoded by the allelic variant comprises one or more motifs selected from a group consisting of motifs 7 to 18 as defined herein and/or one or more signatures 1 to 6 as defined herein, and/or has biological activity particularly enzymatic activity, more particularly peroxidase activity, and/or has at least 50% sequence identity to SEQ ID NO: 293, 295, or 297.

[0269] Gene shuffling or directed evolution may also be used to generate variants of nucleic acids encoding ELM2-related polypeptides, or WRKY-related polypeptides, or EMG1-like polypeptides, or GPx-related polypeptides, as defined above; the term “gene shuffling” being as defined herein.

[0270] In yet another embodiment, there is provided a method for enhancing yield-related traits in plants, comprising introducing and expressing in a plant a variant of a nucleic acid encoding any one of the proteins given in Table A1 to A4 of the Examples section, or comprising introducing and expressing in a plant a variant of a nucleic acid encoding an orthologue, paralogue or homologue of any of the amino acid sequences given in Table A1 to A4 of the Examples section, which variant nucleic acid is obtained by gene shuffling.

[0271] With respect to ELM2-related polypeptides, the amino acid sequence encoded by the variant nucleic acid obtained by gene shuffling, when used in the construction of a phylogenetic tree such as the one depicted in FIG. 4, preferably clusters with the group of ELM2-related polypeptides as indicated in bold, comprising the amino acid sequences represented by SEQ ID NO: 2 and 4, rather than with any other group, and comprises any one or more of the motifs as represented by SEQ ID NO: 93 to SEQ ID NO: 95, and/or has transcriptional repression biological activity, and/or has at least 9% sequence identity to SEQ ID NO: 2.

[0272] With respect to EMG1-like polypeptides, the amino acid sequence encoded by the variant nucleic acid obtained by gene shuffling, when used in the construction of a phylogenetic tree, such as the one depicted in FIG. 13, preferably clusters with the group of EMG1-like polypeptides comprising the amino acid sequence represented by SEQ ID NO: 179 rather than with any other group, and/or comprises any of the motifs 4 to 6, and/or has RNA binding activity, and/or has at least 80% sequence identity to SEQ ID NO: 179.

[0273] With respect to GPx-related polypeptides, the amino acid sequence encoded by the variant nucleic acid obtained by gene shuffling preferably comprises one or more motifs selected from a group consisting of motifs 7 to 18 as defined herein and/or one or more signatures 1 to 6 as defined herein, and/or has biological activity particularly enzymatic activity, more particularly peroxidase activity, and/or has at least 50% sequence identity to SEQ ID NO: 293, 295 or 297.

[0274] Furthermore, nucleic acid variants may also be obtained by site-directed mutagenesis. Several methods are available to achieve site-directed mutagenesis, the most common being PCR based methods (Current Protocols in Molecular Biology. Wiley Eds.).

[0275] ELM2-related polypeptides differing from the sequence of SEQ ID NO: 2 by one or several amino acids (substitution(s), insertion(s) and/or deletion(s) as defined above) may equally be useful to increase the yield of plants in the methods and constructs and plants of the invention.

[0276] Nucleic acids encoding ELM2-related polypeptides may be derived from any natural or artificial source. The nucleic acid may be modified from its native form in composition and/or genomic environment through deliberate human manipulation. Preferably the ELM2-related polypeptide-encoding nucleic acid is from a plant, further preferably from a dicotyledonous plant, more preferably from the family Salicaceae, most preferably the nucleic acid is from Populus trichocarpa. In an alternative more preferred embodiment, the ELM2-related polypeptide-encoding nucleic acid is from the family Fabaceae, most preferably the nucleic acid is from Medicago truncatula. Preferably, the nucleic acid from Medicago truncatula is as represented by SEQ ID NO: 1.

[0277] WRKY-related polypeptides differing from the sequence of SEQ ID NO: 103 by one or several amino acids (substitution(s), insertion(s) and/or deletion(s) as defined above) may equally be useful to increase the yield of plants in the methods and constructs and plants of the invention.

[0278] Nucleic acids encoding WRKY-related polypeptides may be derived from any natural or artificial source. The nucleic acid may be modified from its native form in composition and/or genomic environment through deliberate human manipulation. Preferably the WRKY-related polypeptide-encoding nucleic acid is from a plant, preferably from a dicotyledonous plant, further preferably from a leguminous plant, more preferably from the genus Medicago, most preferably from Medicago truncatula. Preferably, the nucleic acid from Medicago truncatula is as represented by SEQ ID NO: 102.

[0279] EMG1-like polypeptides differing from the sequence of SEQ ID NO: 179 by one or several amino acids (substitution(s), insertion(s) and/or deletion(s) as defined above) may equally be useful to increase the yield of plants in the methods and constructs and plants of the invention.

[0280] Nucleic acids encoding EMG1-like polypeptides may be derived from any natural or artificial source. The nucleic acid may be modified from its native form in composition and/or genomic environment through deliberate human manipulation. Preferably the EMG1-like polypeptide-encoding nucleic acid is from a plant, further preferably from a dicotyledonous plant, more preferably from the family Salicaceae, most preferably the nucleic acid is from Populus trichocarpa. Preferably, the nucleic acid from Populus trichocarpa is as represented by SEQ ID NO: 178.

[0281] GPx-related polypeptides differing from the sequence of SEQ ID NO: 293, 295 or 297 by one or several amino acids (substitution(s), insertion(s) and/or deletion(s) as defined herein) may equally be useful to increase the yield of plants in the methods and constructs and plants of the invention.

[0282] Nucleic acids encoding GPx-related polypeptides may be derived from any natural or artificial source. The nucleic acid may be modified from its native form in composition and/or genomic environment through deliberate human manipulation. Preferably the GPx-related polypeptide-encoding nucleic acid is from a plant, further preferably from a monocotyledonous plant, more preferably from the family Poaceae, most preferably the nucleic acid is from Oryza sativa. Preferably, the nucleic acid from Oryza sativa is as represented by SEQ ID NO: 292.

[0283] In another embodiment, the GPx-related polypeptide-encoding nucleic acid is from a plant, further preferably from a dicotyledonous plant, more preferably from the family Salicaceae, more preferably from the genus Populus, most preferably the nucleic acid is from Populus trichocarpa. Preferably, the nucleic acid from Populus trichocarpa is as represented by SEQ ID NO: 294 or 296.

[0284] In another embodiment the present invention extends to recombinant chromosomal DNA comprising a nucleic acid sequence useful in the methods of the invention, wherein said nucleic acid is present in the chromosomal DNA as a result of recombinant methods, i.e. said nucleic acid is not in the chromosomal DNA in its natural genetic environment. In a further embodiment the recombinant chromosomal DNA of the invention is comprised in a plant cell. DNA comprised within a cell, particularly a cell with cell walls like a plant cell, is better protected from degradation than a bare nucleic acid sequence. The same holds true for a DNA construct comprised in a host cell, for example a plant cell.

[0285] Performance of the methods of the invention gives plants having enhanced yield-related traits. In particular performance of the methods of the invention gives plants having increased early vigour and/or increased yield, especially increased biomass and/or increased seed yield relative to or compared to control plants. The terms “early vigour” “yield” and “seed yield” are described in more detail in the “definitions” section herein.

[0286] Reference herein to enhanced yield-related traits is taken to mean an increase in early vigour and/or in biomass (weight) of one or more parts of a plant, which may include (i) aboveground parts and preferably aboveground harvestable parts and/or (ii) parts below ground and preferably harvestable below ground. In particular, such harvestable parts are seeds, and performance of the methods of the invention results in plants having increased seed yield relative to or compared to the seed yield of control plants. In another particular embodiment, such harvestable parts are aboveground biomass, and performance of the methods of the invention results in plants having increased biomass relative to or compared to the biomass of control plants.

[0287] The present invention provides a method for increasing yield-related traits, especially biomass and/or seed yield of plants, relative or compared to control plants, which method comprises modulating expression in a plant of a nucleic acid encoding an ELM2-related polypeptide as defined herein. The terms “relative to” and “compared to” can be used interchangeably.

[0288] The present invention also provides a method for increasing yield-related traits, especially seed yield of plants, relative to or compared to control plants, which method comprises modulating expression in a plant of a nucleic acid encoding a WRKY-related polypeptide as defined herein. The terms “relative to” and “compared to” can be used interchangeably.

[0289] The present invention also provides a method for increasing yield-related traits, especially seed yield of plants, relative to control plants, which method comprises modulating expression in a plant of a nucleic acid encoding an EMG1-like polypeptide as defined herein. The terms “relative to” and “compared to” can be used interchangeably.

[0290] The present invention also provides a method for increasing yield-related traits, especially biomass and/or seed yield of plants, relative to or compared to control plants, which method comprises modulating expression in a plant of a nucleic acid encoding a GPx-related polypeptide as defined herein.

[0291] According to a preferred feature of the present invention, performance of the methods of the invention gives plants having an increased growth rate relative to control plants. Therefore, according to the present invention, there is provided a method for increasing the growth rate of plants, which method comprises modulating expression in a plant of a nucleic acid encoding an ELM2-related polypeptide, or a WRKY-related polypeptide, or an EMG1-like polypeptide, or a GPx-related polypeptide, as defined herein.

[0292] Performance of the methods of the invention gives plants grown under non-stress conditions or under mild drought conditions increased yield-related traits relative to control plants grown under comparable conditions. Therefore, according to the present invention, there is provided a method for increasing yield-related traits and/or yield in plants grown under non-stress conditions or under mild drought conditions, which method comprises modulating expression in a plant of a nucleic acid encoding an ELM2-related polypeptide, or a WRKY-related polypeptide, or an EMG1-like polypeptide, or a GPx-related polypeptide.

[0293] With respect to WRKY-related polypeptides, in one embodiment, performance of the methods of the invention gives plants grown under abiotic conditions abiotic stress resistance.

[0294] Performance of the methods of the invention gives plants grown under conditions of drought, increased yield-related traits relative to control plants grown under comparable conditions. Therefore, according to the present invention, there is provided a method for increasing yield-related traits and/or yield in plants grown under conditions of drought which method comprises modulating expression in a plant of a nucleic acid encoding an ELM2-related polypeptide, or a WRKY-related polypeptide, or an EMG1-like polypeptide, or a GPx-related polypeptide.

[0295] Performance of the methods of the invention gives plants grown under conditions of nutrient deficiency, particularly under conditions of nitrogen deficiency, increased yield-related traits relative to control plants grown under comparable conditions. Therefore, according to the present invention, there is provided a method for increasing yield-related traits and/or yield in plants grown under conditions of nutrient deficiency, which method comprises modulating expression in a plant of a nucleic acid encoding an ELM2-related polypeptide, or a WRKY-related polypeptide, or an EMG1-like polypeptide, or a GPx-related polypeptide.

[0296] Performance of the methods of the invention gives plants grown under conditions of salt stress, increased yield-related traits relative to control plants grown under comparable conditions. Therefore, according to the present invention, there is provided a method for increasing yield-related traits and/or yield in plants grown under conditions of salt stress, which method comprises modulating expression in a plant of a nucleic acid encoding an ELM2-related polypeptide, or a WRKY-related polypeptide, or an EMG1-like polypeptide, or a GPx-related polypeptide.

[0297] The invention also provides genetic constructs and vectors to facilitate introduction and/or expression in plants of nucleic acids encoding ELM2-related polypeptides, or WRKY-related polypeptides, or EMG1-like polypeptides, or GPx-related polypeptides. The gene constructs may be inserted into vectors, which may be commercially available, suitable for transforming into plants or host cells and suitable for expression of the gene of interest in the transformed cells. The invention also provides use of a gene construct as defined herein in the methods of the invention.

[0298] More specifically, the present invention provides a construct comprising:
[0299] (a) a nucleic acid encoding an ELM2-related polypeptide, or a WRKY-related polypeptide, or an EMG1-like polypeptide, or a GPx-related polypeptide, as defined above;
[0300] (b) one or more control sequences capable of driving expression of the nucleic acid sequence of (a); and optionally
[0301] (c) a transcription termination sequence.

[0302] Preferably, the nucleic acid encoding an ELM2-related polypeptide, or a WRKY-related polypeptide, or an EMG1-like polypeptide, or a GPx-related polypeptide, is as defined above. The term “control sequence” and “termination sequence” are as defined herein.

[0303] The genetic construct of the invention may be comprised in a host cell, plant cell, seed, agricultural product or plant. Plants or host cells are transformed with a genetic construct such as a vector or an expression cassette comprising any of the nucleic acids described above. Thus the invention furthermore provides plants or host cells transformed with a construct as described above. In particular, the invention provides plants transformed with a construct as described above, which plants have increased yield-related traits as described herein.

[0304] In one embodiment the genetic construct of the invention confers increased yield or yield related traits to a plant when it has been introduced into said plant, which plant expresses the nucleic acid encoding the ELM2-related polypeptide, or the WRKY-related polypeptide, or the EMG1-like polypeptide, or the GPx-related polypeptide, comprised in the genetic construct. In another embodiment the genetic construct of the invention confers increased yield or yield related traits(s) to a plant comprising plant cells in which the construct has been introduced, which plant cells express the nucleic acid encoding the ELM2-related polypeptide, or the WRKY-related polypeptide, or the EMG1-like polypeptide, or the GPx-related polypeptide, comprised in the genetic construct.

[0305] The promoter in such a genetic construct may be a non-native promoter to the nucleic acid described above, i.e. a promoter not regulating the expression of said nucleic acid in its native surrounding. The expression cassettes or the genetic construct of the invention may be comprised in a host cell, plant cell, seed, agricultural product or plant.

[0306] The skilled artisan is well aware of the genetic elements that must be present on the genetic construct in order to successfully transform, select and propagate host cells containing the sequence of interest. The sequence of interest is operably linked to one or more control sequences (at least to a promoter).

[0307] Advantageously, any type of promoter, whether natural or synthetic, may be used to drive expression of the nucleic acid sequence, but preferably the promoter is of plant origin. A constitutive promoter is particularly useful in the methods. See the “Definitions” section herein for definitions of the various promoter types. With respect to WRKY-related polypeptides, and GPx-related polypeptides, also useful in the methods of the invention is a root-specific promoter.

[0308] The constitutive promoter is preferably a ubiquitous constitutive promoter of medium strength. More preferably, it is a plant derived promoter, e.g. a promoter of plant chromosomal origin, such as a GOS2 promoter or a promoter of substantially the same strength and having substantially the same expression pattern (a functionally equivalent promoter), more preferably the promoter is the GOS2 promoter from rice. Further preferably, the constitutive promoter is represented by a nucleic acid sequence substantially similar to SEQ ID NO: 97, or to SEQ ID NO: 174, or to SEQ ID NO: 289, or to SEQ ID NO: 379, most preferably the constitutive promoter is as represented by SEQ ID NO: 97, or SEQ ID NO: 174, or SEQ ID NO: 289, or SEQ ID NO: 379. See the “Definitions” section herein for further examples of constitutive promoters.

[0309] With respect to WRKY-related polypeptides, and GPx-related polypeptides, according to another preferred embodiment of the invention, the nucleic acid encoding a WRKY-related polypeptide, or a GPx-related polypeptide, is operably linked to a root-specific promoter. The root-specific promoter is preferably an RCc3 promoter (Plant Mol Biol. 1995 January; 27(2):237-48) or a promoter of substantially the same strength and having substantially the same expression pattern (a functionally equivalent promoter), more preferably the RCc3 promoter is from rice, further preferably the RCc3 promoter is represented by a nucleic acid sequence substantially similar to SEQ ID NO: 175, or to SEQ ID NO: 380, most preferably the promoter is as represented by SEQ ID NO: 175, or SEQ ID NO: 380. Examples of other root-specific promoters which may also be used to perform the methods of the invention are shown in Table 2b in the “Definitions” section.

[0310] With respect to ELM2-related polypeptides, it should be clear that the applicability of the present invention is not restricted to the ELM2-related polypeptide-encoding nucleic acid represented by SEQ ID NO: 1 or SEQ ID NO: 3, nor is the applicability of the invention restricted to expression of an ELM2-related polypeptide-encoding nucleic acid when driven by a constitutive promoter.

[0311] Optionally, one or more terminator sequences may be used in the construct introduced into a plant. Preferably, the construct comprises an expression cassette comprising a GOS2 promoter, substantially similar to SEQ ID NO: 97, operably linked to the nucleic acid encoding the ELM2-related polypeptide. More preferably, the construct comprises a zein terminator (t-zein) linked to the 3′ end of the ELM2-related coding sequence. Most preferably, the expression cassette comprises a sequence having in increasing order of preference at least 95%, at least 96%, at least 97%, at least 98%, at least 99% identity to the sequence represented by SEQ ID NO: 96 (pPRO::ELM2-related::t-zein sequence). Furthermore, one or more sequences encoding selectable markers may be present on the construct introduced into a plant.

[0312] With respect to WRKY-related polypeptides, it should be clear that the applicability of the present invention is not restricted to the WRKY-related polypeptide-encoding nucleic acid represented by SEQ ID NO: 102, nor is the applicability of the invention restricted to expression of a WRKY-related polypeptide-encoding nucleic acid when driven by a constitutive promoter, or when driven by a root-specific promoter.

[0313] Optionally, one or more terminator sequences may be used in the construct introduced into a plant. Preferably, the construct comprises an expression cassette comprising a GOS2 promoter, substantially similar to SEQ ID NO: 174, operably linked to the nucleic acid encoding WRKY-related polypeptide. More preferably, the construct comprises a zein terminator (t-zein) linked to the 3′ end of the WRKY-related polypeptide coding sequence. Furthermore, one or more sequences encoding selectable markers may be present on the construct introduced into a plant.

[0314] With respect to EMG1-like polypeptides, it should be clear that the applicability of the present invention is not restricted to the EMG1-like polypeptide-encoding nucleic acid represented by SEQ ID NO: 178, nor is the applicability of the invention restricted to expression of a EMG1-like polypeptide-encoding nucleic acid when driven by a constitutive promoter.

[0315] Optionally, one or more terminator sequences may be used in the construct introduced into a plant. Preferably, the construct comprises an expression cassette comprising a GOS2 promoter, substantially similar to SEQ ID NO: 289, operably linked to the nucleic acid encoding the EMG1-like polypeptide. More preferably, the construct comprises a zein terminator (t-zein) linked to the 3′ end of the EMG1-like coding sequence. Furthermore, one or more sequences encoding selectable markers may be present on the construct introduced into a plant.

[0316] With respect to GPx-related polypeptides, it should be clear that the applicability of the present invention is not restricted to the GPx-related polypeptide-encoding nucleic acid represented by SEQ ID NO: 292, 294 or 296, nor is the applicability of the invention restricted to the rice GOS2 promoter when expression of a GPx-related polypeptide-encoding nucleic acid is driven by a constitutive promoter, or when driven by a root-specific promoter.

[0317] Optionally, one or more terminator sequences may be used in the construct introduced into a plant. Those skilled in the art will be aware of terminator sequences that may be suitable for use in performing the invention. Preferably, the construct comprises an expression cassette comprising a GOS2 promoter, substantially similar to SEQ ID NO: 379, operably linked to the nucleic acid encoding the GPx-related polypeptide. More preferably, the construct furthermore comprises a zein terminator (t-zein) linked to the 3′ end of the GPx-related coding sequence.

[0318] According to a preferred feature of the invention, the modulated expression is increased expression. Methods for increasing expression of nucleic acids or genes, or gene products, are well documented in the art and examples are provided in the definitions section.

[0319] As mentioned above, a preferred method for modulating expression of a nucleic acid encoding an ELM2-related polypeptide, or a WRKY-related polypeptide, or an EMG1-like polypeptide, or a GPx-related polypeptide, is by introducing and expressing in a plant a nucleic acid encoding an ELM2-related polypeptide, or a WRKY-related polypeptide, or an EMG1-like polypeptide, or a GPx-related polypeptide, respectively; however the effects of performing the method, i.e. enhancing yield-related traits may also be achieved using other well known techniques, including but not limited to T-DNA activation tagging, TILLING, homologous recombination. A description of these techniques is provided in the definitions section.

[0320] The invention also provides a method for the production of transgenic plants having enhanced yield-related traits relative to control plants, comprising introduction and expression in a plant of any nucleic acid encoding an ELM2-related polypeptide, or a WRKY-related polypeptide, or an EMG1-like polypeptide, or a GPx-related polypeptide, as defined herein.

[0321] With respect to ELM2-related polypeptides, the present invention more specifically provides a method for the production of transgenic plants having enhanced yield-related traits, particularly increased yield, more in particular increased biomass and increased seed yield, which method comprises:
[0322] (i) introducing and expressing in a plant or plant cell an ELM2-related polypeptide-encoding nucleic acid or a genetic construct comprising an ELM2-related polypeptide-encoding nucleic acid; and
[0323] (ii) cultivating the plant cell under conditions promoting plant growth and development.

[0324] The nucleic acid of (i) may be any of the nucleic acids capable of encoding an ELM2-related polypeptide as defined herein. Preferably the nucleic acid encoding the ELM2-related polypeptide and to be introduced into the plant is an isolated nucleic acid or is comprised in a genetic construct as described above.

[0325] With respect to WRKY-related polypeptides, the present invention more specifically provides a method for the production of transgenic plants having enhanced yield-related traits, particularly increased yield, which method comprises:
[0326] (i) introducing and expressing in a plant or plant cell a WRKY-related polypeptide-encoding nucleic acid or a genetic construct comprising a WRKY-related polypeptide-encoding nucleic acid; and
[0327] (ii) cultivating the plant cell under conditions promoting plant growth and development.

[0328] The nucleic acid of (i) may be any of the nucleic acids capable of encoding a WRKY-related polypeptide as defined herein. Preferably the nucleic acid encoding the WRKY-related polypeptide and to be introduced into the plant is an isolated nucleic acid or is comprised in a genetic construct as described above.

[0329] With respect to EMG1-like polypeptides, the present invention more specifically provides a method for the production of transgenic plants having enhanced yield-related traits, particularly increased seed yield, which method comprises:
[0330] (i) introducing and expressing in a plant or plant cell a EMG1-like polypeptide-encoding nucleic acid or a genetic construct comprising a EMG1-like polypeptide-encoding nucleic acid; and
[0331] (ii) cultivating the plant cell under conditions promoting plant growth and development.

[0332] The nucleic acid of (i) may be any of the nucleic acids capable of encoding an EMG1-like polypeptide as defined herein. Preferably the nucleic acid encoding the EMG1-like polypeptide and to be introduced into the plant is an isolated nucleic acid or is comprised in a genetic construct as described above.

[0333] With respect to GPx-related polypeptides, the present invention more specifically provides a method for the production of transgenic plants having enhanced yield-related traits, particularly increased (seed) yield, which method comprises:
[0334] (i) introducing and expressing in a plant or plant cell a GPx-related polypeptide-encoding nucleic acid or a genetic construct comprising a GPx-related polypeptide-encoding nucleic acid; and
[0335] (ii) cultivating the plant cell under conditions promoting plant growth and development.

[0336] The nucleic acid of (i) may be any of the nucleic acids capable of encoding a GPx-related polypeptide as defined herein. Preferably the nucleic acid encoding the GPx-related polypeptide and to be introduced into the plant is an isolated nucleic acid or is comprised in a genetic construct as described above.

[0337] Cultivating the plant cell under conditions promoting plant growth and development, may or may not include regeneration and/or growth to maturity. Accordingly, in a particular embodiment of the invention, the plant cell transformed by the method according to the invention is regenerable into a transformed plant. In another particular embodiment, the plant cell transformed by the method according to the invention is not regenerable into a transformed plant, i.e. cells that are not capable to regenerate into a plant using cell culture techniques known in the art. While plants cells generally have the characteristic of totipotency, some plant cells can not be used to regenerate or propagate intact plants from said cells. In one embodiment of the invention the plant cells of the invention are such cells. In another embodiment the plant cells of the invention are plant cells that do not sustain themselves in an autotrophic way, such plant cells are not deemed to represent a plant variety. One example are plant cells that do not sustain themselves through photosynthesis by synthesizing carbohydrate and protein from such inorganic substances as water, carbon dioxide and mineral salt. In a further embodiment the plant cells of the invention are non-plant variety and non-propagative.

[0338] The nucleic acid may be introduced directly into a plant cell or into the plant itself (including introduction into a tissue, organ or any other part of a plant). According to a preferred feature of the present invention, the nucleic acid is preferably introduced into a plant or plant cell by transformation. The term “transformation” is described in more detail in the “definitions” section herein.

[0339] In one embodiment the present invention extends to any plant cell or plant produced by any of the methods described herein, and to all plant parts and propagules thereof.

[0340] The present invention encompasses plants or parts thereof (including seeds) obtainable by the methods according to the present invention. The plants or plant parts or plant cells comprise a nucleic acid transgene encoding an ELM2-related polypeptide, or a WRKY-related polypeptide, or an EMG1-like polypeptide, or a GPx-related polypeptide as defined above, preferably in a genetic construct such as an expression cassette. The present invention extends further to encompass the progeny of a primary transformed or transfected cell, tissue, organ or whole plant that has been produced by any of the aforementioned methods, the only requirement being that progeny exhibit the same genotypic and/or phenotypic characteristic(s) as those produced by the parent in the methods according to the invention.

[0341] In a further embodiment the invention extends to seeds recombinantly comprising the expression cassettes of the invention, the genetic constructs of the invention, or the nucleic acids encoding the ELM2-related polypeptide, or WRKY-related polypeptide, or EMG1-like polypeptide, or GPx-related polypeptide, and/or the ELM2-related polypeptides, or the WRKY-related polypeptides, or the EMG1-like polypeptides, or the GPx-related polypeptides respectively, as described above.

[0342] The invention also includes host cells containing an isolated nucleic acid encoding an ELM2-related polypeptide, or a WRKY-related polypeptide, or an EMG1-like polypeptide, or a GPx-related polypeptide, as defined above. In one embodiment host cells according to the invention are plant cells, yeasts, bacteria or fungi. Host plants for the nucleic acids, construct, expression cassette or the vector used in the method according to the invention are, in principle, advantageously all plants which are capable of synthesizing the polypeptides used in the inventive method. In a particular embodiment the plant cells of the invention overexpress the nucleic acid molecule of the invention.

[0343] The methods of the invention are advantageously applicable to any plant, in particular to any plant as defined herein. Plants that are particularly useful in the methods of the invention include all plants which belong to the superfamily Viridiplantae, in particular monocotyledonous and dicotyledonous plants including fodder or forage legumes, ornamental plants, food crops, trees or shrubs. According to an embodiment of the present invention, the plant is a crop plant. Examples of crop plants include but are not limited to chicory, carrot, cassava, trefoil, soybean, beet, sugar beet, sunflower, canola, alfalfa, rapeseed, linseed, cotton, tomato, potato and tobacco. According to another embodiment of the present invention, the plant is a monocotyledonous plant. Examples of monocotyledonous plants include sugarcane. According to another embodiment of the present invention, the plant is a cereal. Examples of cereals include rice, maize, wheat, barley, millet, rye, triticale, sorghum, emmer, spelt, einkorn, teff, milo and oats. In a particular embodiment the plants of the invention or used in the methods of the invention are selected from the group consisting of maize, wheat, rice, soybean, cotton, oilseed rape including canola, sugarcane, sugar beet and alfalfa. Advantageously the methods of the invention are more efficient than the known methods, because the plants of the invention have increased yield and/or tolerance to an environmental stress compared to control plants used in comparable methods.

[0344] The invention also extends to harvestable parts of a plant such as, but not limited to seeds, leaves, fruits, flowers, stems, roots, rhizomes, tubers and bulbs, which harvestable parts comprise a recombinant nucleic acid encoding an ELM2-related polypeptide, or a WRKY-related polypeptide, or an EMG1-like polypeptide, or a GPx-related polypeptide. The invention furthermore relates to products derived or produced, preferably directly derived or directly produced, from a harvestable part of such a plant, such as dry pellets, meal or powders, oil, fat and fatty acids, starch or proteins. In one embodiment the product comprises a recombinant nucleic acid encoding an ELM2-related polypeptide, or a WRKY-related polypeptide, or an EMG1-like polypeptide, or a GPx-related polypeptide, and/or a recombinant an ELM2-related polypeptide, or WRKY-related polypeptide, or EMG1-like polypeptide, or GPx-related polypeptide, for example as an indicator of the particular quality of the product.

[0345] The invention also includes methods for manufacturing a product comprising a) growing the plants of the invention and b) producing said product from or by the plants of the invention or parts thereof, including seeds. In a further embodiment the methods comprise the steps of a) growing the plants of the invention, b) removing the harvestable parts as described herein from the plants and c) producing said product from, or with the harvestable parts of plants according to the invention.

[0346] In one embodiment the products produced by the methods of the invention are plant products such as, but not limited to, a foodstuff, feedstuff, a food supplement, feed supplement, fiber, cosmetic or pharmaceutical. In another embodiment the methods for production are used to make agricultural products such as, but not limited to, plant extracts, proteins, amino acids, carbohydrates, fats, oils, polymers, vitamins, and the like.

[0347] In yet another embodiment the polynucleotides or the polypeptides of the invention are comprised in an agricultural product. In a particular embodiment the nucleic acid sequences and protein sequences of the invention may be used as product markers, for example where an agricultural product was produced by the methods of the invention. Such a marker can be used to identify a product to have been produced by an advantageous process resulting not only in a greater efficiency of the process but also improved quality of the product due to increased quality of the plant material and harvestable parts used in the process. Such markers can be detected by a variety of methods known in the art, for example but not limited to PCR based methods for nucleic acid detection or antibody based methods for protein detection.

[0348] The present invention also encompasses use of nucleic acids encoding ELM2-related polypeptides, or WRKY-related polypeptides, or EMG1-like polypeptides, or GPx-related polypeptides, as described herein and use of these ELM2-related polypeptides, or WRKY-related polypeptides, or EMG1-like polypeptides, or GPx-related polypeptides, in enhancing any of the aforementioned yield-related traits in plants. For example, nucleic acids encoding the ELM2-related polypeptides, or the WRKY-related polypeptides, or the EMG1-like polypeptides, or the GPx-related polypeptides, themselves, may find use in breeding programmes in which a DNA marker is identified which may be genetically linked to above described polypeptide-encoding gene. The nucleic acids/genes, or the ELM2-related polypeptides, or the WRKY-related polypeptides, or the EMG1-like polypeptides, or the GPx-related polypeptides, themselves may be used to define a molecular marker. This DNA or protein marker may then be used in breeding programmes to select plants having enhanced yield-related traits as defined herein in the methods of the invention. Furthermore, allelic variants of a nucleic acid/gene encoding an ELM2-related polypeptide, or a WRKY-related polypeptide, or an EMG1-like polypeptide, or a GPx-related polypeptide, may find use in marker-assisted breeding programmes. Nucleic acids encoding ELM2-related polypeptides, or WRKY-related polypeptides, or EMG1-like polypeptides, or GPx-related polypeptides, may also be used as probes for genetically and physically mapping the genes that they are a part of, and as markers for traits linked to those genes. Such information may be useful in plant breeding in order to develop lines with desired phenotypes.

[0349] In the following, the expression “as defined in claim/embodiment X” is meant to direct the artisan to apply the definition as disclosed in claim/embodiment X. For example, “a nucleic acid as defined in embodiment 1” has to be understood so that the definition of the nucleic acid as in embodiment 1 is to be applied to the nucleic acid. In consequence the term “as defined in item” or “as defined in claim” may be replaced with the corresponding definition of that embodiment or claim, respectively.

[0350] With respect to ELM2-related polypeptides, the present invention moreover relates to the following specific embodiments:
[0351] 1. A method for enhancing yield-related traits in plants relative to control plants, comprising modulating expression in a plant of a nucleic acid encoding an ELM2-related poly-peptide, wherein said ELM2-related polypeptide comprises an Interpro accession IPR 000949, according to PFAM accession number PF01448 ELM2 domain.
[0352] 2. Method according to embodiment 1, wherein said ELM2-related polypeptide comprises one or more motifs having at least 80% sequence identity with one or more of the following motifs:

(i)
Motif 1: [I/V]GKGR[S/Q]DSC[G/R]CQV[Q/P][K/G]S[I/V]
[K/E]CVRFH[I/V][T/A]E[R/K][SR][S/A/L][R/K][V/L]
[M/K][R/L]E[L/I]G[K/V/S]AF[N/Y][Q/H/A]W[R/G/N]
[F/L]D[K/R][M/A]GEE represented by SEQ ID NO: 93,
(ii)
Motif 2: [R/T/K]xFP[S/K][R/K][R/S/G]R[E/K][D/S/E]
LVSYY[Y/F]NVFLL[Q/R]RR[A/G][N/Y]QNR[S/H/V]TP
[D/N/K][S/N]I represented by SEQ ID NO: 94,
(iii)
Motif 3: [P/S][I/P][T/R]xxIP[V/L]GP[V/N][F/H]QAE
[V/I]PEWT represented by SEQ ID NO: 95

[0353] wherein x can be any amino acid.
[0354] 3. Method according to embodiment 1 or 2, wherein said modulated expression is effected by introducing and expressing in a plant said nucleic acid encoding said ELM2-related polypeptide.
[0355] 4. Method according to any one of embodiments 1 to 3, wherein said enhanced yield-related traits comprise increased yield relative to control plants, and preferably comprise increased biomass and/or increased seed yield relative to control plants.
[0356] 5. Method according to any one of embodiments 1 to 4, wherein said enhanced yield-related traits are obtained under non-stress conditions.
[0357] 6. Method according to any one of embodiments 1 to 4, wherein said enhanced yield-related traits are obtained under conditions of drought stress, salt stress or nitrogen deficiency.
[0358] 7. Method according to any one of embodiments 1 to 6, wherein said nucleic acid encoding an ELM2-related polypeptide is of plant origin, preferably from a dicotyledonous plant, further preferably from the family Salicaceae, more preferably from the genus Populus, most preferably from Populus trichocarpa.
[0359] 8. Method according to any one of embodiments 1 to 6, wherein said nucleic acid encoding an ELM2-related polypeptide is of plant origin, preferably from a dicotyledonous plant, further preferably from the family Fabaceae, more preferably from the genus Medicago, most preferably from Medicago truncatula.
[0360] 9. Method according to any one of embodiments 1 to 8, wherein said nucleic acid encoding an ELM2-related encodes any one of the polypeptides listed in Table A1 or is a portion of such a nucleic acid, or a nucleic acid capable of hybridising with such a nucleic acid.
[0361] 10. Method according to any one of embodiments 1 to 9, wherein said nucleic acid sequence encodes an orthologue or paralogue of any of the polypeptides given in Table A1.
[0362] 11. Method according to any one of embodiments 1 to 10, wherein said nucleic acid encodes the polypeptide represented by any one of SEQ ID NO: 2 or SEQ ID NO: 4 or a homologue thereof which has at least 90% overall sequence identity to SEQ ID NO: 2 or SEQ ID NO: 4.
[0363] 12. Method according to any one of embodiments 1 to 11, wherein said nucleic acid is operably linked to a constitutive promoter, preferably to a medium strength constitutive promoter, preferably to a plant promoter, more preferably to a GOS2 promoter, most preferably to a GOS2 promoter from rice.
[0364] 13. Plant, plant part thereof, including seeds, or plant cell, obtainable by a method according to any one of embodiments 1 to 12, wherein said plant, plant part or plant cell comprises a recombinant nucleic acid encoding an ELM2-related polypeptide as defined in any of embodiments 1 and 6 to 11.
[0365] 14. Construct comprising:
   [0366] (i) nucleic acid encoding an ELM2-related polypeptide as defined in any of embodiments 1 and 6 to 11;
   [0367] (ii) one or more control sequences capable of driving expression of the nucleic acid sequence of (i); and optionally
   [0368] (iii) a transcription termination sequence.
[0369] 15. Construct according to embodiment 14, wherein one of said control sequences is a constitutive promoter, preferably a medium strength constitutive promoter, preferably to a plant promoter, more preferably a GOS2 promoter, most preferably a GOS2 promoter from rice.
[0370] 16. Use of a construct according to embodiment 14 or 15 in a method for making plants having enhanced yield-related traits, preferably increased yield relative to control plants, and more preferably increased seed yield and/or increased biomass relative to control plants.
[0371] 17. Plant, plant part or plant cell transformed with a construct according to embodiment 14 or 15.
[0372] 18. Method for the production of a transgenic plant having enhanced yield-related traits relative to control plants, preferably increased yield relative to control plants, and more preferably increased seed yield and/or increased biomass relative to control plants, comprising:
   [0373] (i) introducing and expressing in a plant cell or plant a nucleic acid encoding an ELM2-related polypeptide as defined in any of embodiments 1 and 6 to 11; and
   [0374] (ii) cultivating said plant cell or plant under conditions promoting plant growth and development.
[0375] 19. Transgenic plant having enhanced yield-related traits relative to control plants, preferably increased yield relative to control plants, and more preferably increased seed yield and/or increased biomass, resulting from modulated expression of a nucleic acid encoding an ELM2-related polypeptide as defined in any of embodiments 1 and 6 to 11 or a transgenic plant cell derived from said transgenic plant.
[0376] 20. Transgenic plant according to embodiment 13, 17 or 19, or a transgenic plant cell derived therefrom, wherein said plant is a crop plant, such as beet, sugarbeet or alfalfa; or a monocotyledonous plant such as sugarcane; or a cereal, such as rice, maize, wheat, barley, millet, rye, triticale, sorghum, emmer, spelt, einkorn, teff, milo or oats.
[0377] 21. Harvestable parts of a plant according to embodiment 20, wherein said harvestable parts are preferably shoot biomass and/or seeds.
[0378] 22. Products derived from a plant according to embodiment 20 and/or from harvestable parts of a plant according to embodiment 21.
[0379] 23. Use of a nucleic acid encoding an ELM2-related polypeptide as defined in any of embodiments 1 and 6 to 11 for enhancing yield-related traits in plants relative to control plants, preferably for increasing yield, and more preferably for increasing seed yield and/or for increasing biomass in plants relative to control plants.
[0380] 24. A method for manufacturing a product comprising the steps of growing the plants according to embodiment 13, 17, 20 or 21 and producing said product from or by said plants; or parts thereof, including seeds.
[0381] 25. Construct according to embodiment 14 or 15 comprised in a plant cell.
[0382] 26. Recombinant chromosomal DNA comprising the construct according to embodiment 14 or 15.
[0383] 27. A method of growing a transgenic plant comprising:
   [0384] a. planting a transformed seed comprising a nucleic acid sequence as defined in any of embodiments 1 and 6 to 11;
   [0385] b. growing a plant from said seed.

[0386] With respect to WRKY-related polypeptides, the present invention moreover relates to the following specific embodiments:
[0387] 1. A method for enhancing yield in plants relative to or compared to control plants, comprising modulating expression in a plant of a nucleic acid molecule encoding a WRKY-related polypeptide, preferably comprising one or more motifs selected from a group consisting of WRKYGQ motif, basic motif, coiled coil motif as defined herein.
[0388] 2. Method according to embodiment 1, wherein said modulated expression is effected by introducing and expressing in a plant a nucleic acid molecule encoding a WRKY-related polypeptide.
[0389] 3. Method according to embodiment 1 or 2, wherein said polypeptide is encoded by a nucleic acid molecule comprising a nucleic acid molecule selected from the group consisting of:
   [0390] (i) a nucleic acid represented by SEQ ID NO: 102;
   [0391] (ii) the complement of a nucleic acid represented by SEQ ID NO: 102;
   [0392] (iii) a nucleic acid encoding the polypeptide as represented by SEQ ID NO: 103, preferably as a result of the degeneracy of the genetic code, said isolated nucleic acid can be deduced from a polypeptide sequence as represented by SEQ ID NO: 103 and further preferably confers enhanced yield-related traits relative to or compared to control plants;
   [0393] (iv) a nucleic acid having, in increasing order of preference at least 30%, 31%, 32%, 33%, 34%, 35%, 36%, 37%, 38%, 39%, 40%, 41%, 42%, 43%, 44%, 45%, 46%, 47%, 48%, 49%, 50%, 51%, 52%, 53%, 54%, 55%, 56%, 57%, 58%, 59%, 60%, 61%, 62%, 63%, 64%, 65%, 66%, 67%, 68%, 69%, 70%, 71%, 72%, 73%, 74%, 75%, 76%, 77%, 78%, 79%, 80%, 81%, 82%, 83%, 84%, 85%, 86%, 87%, 88%, 89%, 90%, 91%, 92%, 93%, 94%, 95%, 96%, 97%, 98%, or 99% sequence identity with the nucleic acid sequence of SEQ ID NO: 102, and further preferably conferring enhanced yield-related traits relative to or compared to control plants, wherein the nucleic acid encodes a polypeptide that is not the polypeptide of the polypeptide sequence as represented by SEQ ID NO: 103;
   [0394] (v) a first nucleic acid molecule which hybridizes with a second nucleic acid molecule of (i) to (iv) under stringent hybridization conditions and preferably confers enhanced yield-related traits relative to or compared to control plants, wherein the first nucleic acid encodes a polypeptide that is not the polypeptide of any of the polypeptide sequence as represented by SEQ ID NO: 103;
   [0395] (vi) a nucleic acid encoding said polypeptide having, in increasing order of preference, at least 50%, 51%, 52%, 53%, 54%, 55%, 56%, 57%, 58%, 59%, 60%, 61%, 62%, 63%, 64%, 65%, 66%, 67%, 68%, 69%, 70%, 71%, 72%, 73%, 74%, 75%, 76%, 77%, 78%, 79%, 80%, 81%, 82%, 83%, 84%, 85%, 86%, 87%, 88%, 89%, 90%, 91%, 92%, 93%, 94%, 95%, 96%, 97%, 98%, or 99% sequence identity to the amino acid sequence represented by SEQ ID NO: 103 and preferably conferring enhanced yield-related traits relative to or compared to control plants; or
   [0396] (vii) a nucleic acid comprising any combination(s) of features of (i) to (vi) above.
[0397] 4. Method according to any embodiment 1 to 3, wherein said enhanced yield-related traits comprise one or more of increased yield, preferably increase of emergence vigour, total seed yield, fill rate, TKW, number of filled seeds, taller more erect plants, amount of thick roots, number of florets per panicle on a plant, increased harvest index, increased greenness of a plant before flowering, increased height of the plant, increased quick early development, increased cycle time relative to or compared to control plants.
[0398] 5. Method according to any one of embodiments 1 to 4, wherein said enhanced yield-related traits are obtained under non-stress conditions.
[0399] 6. Method according to any one of embodiments 1 to 4, wherein said enhanced yield-related traits are obtained under conditions of drought stress, salt stress or nitrogen deficiency.
[0400] 7. Method according to any one of embodiments 1 to 5, wherein said nucleic acid is operably linked to a constitutive promoter, preferably to a GOS2 promoter, most preferably to a GOS2 promoter from rice.
[0401] 8. Method according to any one of embodiments 1 to 7, wherein said nucleic acid molecule or said polypeptide, respectively, is of plant origin, preferably from a dicotyledonous plant, further preferably from a leguminous plant, more preferably from the genus Medicago, most preferably from Medicago truncatula.
[0402] 9. Plant or part thereof, including seeds, obtainable by a method according to any one of embodiments 1 to 8, wherein said plant or part thereof comprises a recombinant nucleic acid encoding said polypeptide as defined in any one of embodiments 1, 3 or 8
[0403] 10. Construct comprising:
   [0404] (i) nucleic acid encoding said polypeptide as defined in any one of embodiments 1, 3 or 8;
   [0405] (ii) one or more control sequences capable of driving expression of the nucleic acid sequence of (a); and optionally
   [0406] (iii) a transcription termination sequence.
[0407] 11. Construct according to embodiment 10, wherein one of said control sequences is a constitutive promoter, preferably a GOS2 promoter, most preferably a GOS2 promoter from rice.
[0408] 12. Use of a construct according to embodiment 10 or 11 in a method for making plants having increased yield, particularly seed yield and/or shoot biomass relative to or compared to control plants.
[0409] 13. Plant, plant part or plant cell transformed with a construct according to embodiment 10 or 11 or obtainable by a method according to any one of embodiments 1 to 8, wherein said plant or part thereof comprises a recombinant nucleic acid encoding said polypeptide as defined in any one of embodiments 1, 3 or 8.
[0410] 14. Method for the production of a transgenic plant having increased yield, particularly increased biomass and/or increased seed yield relative to or compared to control plants, comprising:
   [0411] (i) introducing and expressing in a plant a nucleic acid encoding said polypeptide as defined in any one of embodiments 1, 3 or 8; and
   [0412] (ii) cultivating the plant cell under conditions promoting plant growth and development.
[0413] 15. Plant having increased yield, particularly increased biomass and/or increased seed yield, relative to or compared to control plants, resulting from modulated expression of a nucleic acid encoding said polypeptide, or a transgenic plant cell originating from or being part of said transgenic plant.
[0414] 16. A method for the production of a product comprising the steps of growing the plants of the invention and producing said product from or by
   [0415] (a) the plants of the invention; or
   [0416] (b) parts, including seeds, of these plants.
[0417] 17. Plant according to embodiment 9, 13 or 15 or a transgenic plant cell originating thereof, or a method according to embodiment 16, wherein said plant is a crop plant, preferably a dicot such as sugar beet, alfalfa, trefoil, chicory, carrot, cassava, cotton, soybean, canola or a monocot, such as sugarcane, or a cereal, such as rice, maize, wheat, barley, millet, rye, triticale, sorghum emmer, spelt, secale, einkorn, teff, milo and oats.
[0418] 18. Harvestable parts of a plant according to embodiment 9, 13 or 15 wherein said harvestable parts are preferably shoot and/or root biomass and/or seeds.
[0419] 19. Products produced from a plant according to embodiment 9, 13 or 15 and/or from harvestable parts of a plant according to embodiment 17.
[0420] 20. Use of a nucleic acid encoding a polypeptide as defined in any one of embodiments 1, 3 or 8 in increasing yield, particularly seed yield and/or shoot biomass relative to or compared to control plants.
[0421] 21. Construct according to embodiment 10 or 11 comprised in a plant cell.
[0422] 22. Recombinant chromosomal DNA comprising the construct according to embodiment 10 or 11.

[0423] With respect to EMG1-like polypeptides, the present invention moreover relates to the following specific embodiments:
[0424] 1. A method for enhancing yield-related traits in plants relative to control plants, comprising modulating expression in a plant of a nucleic acid encoding an EMG1-like polypeptide, wherein said EMG1-like polypeptide comprises an InterPro accession IPR005304 EMG1 domain corresponding to PFAM accession number PF03587.
[0425] 2. A method according to embodiment 1, wherein said EMG1-like polypeptide comprises an EMG1 domain having at least 60% sequence identity with the EMG1 domain from amino acid 81 to 276 in SEQ ID NO: 179.
[0426] 3. A method according to any of the embodiments 1 or 2, wherein said EMG1-like polypeptide further comprises one of the motifs represented by SEQ ID NO: 286, SEQ ID NO: 287 or SEQ ID NO: 288.
[0427] 4. Method according to any of the embodiments 1 to 3, wherein said modulated expression is effected by introducing and expressing in a plant said nucleic acid encoding said EMG1-like polypeptide.
[0428] 5. Method according to any of the embodiments 1 to 4, wherein said enhanced yield-related traits comprise increased yield relative to control plants, and preferably comprise increased biomass and/or increased seed yield relative to control plants.
[0429] 6. Method according to any one of embodiments 1 to 5, wherein said enhanced yield-related traits are obtained under non-stress conditions.
[0430] 7. Method according to any one of embodiments 1 to 5, wherein said enhanced yield-related traits are obtained under conditions of drought stress, salt stress or nitrogen deficiency.
[0431] 8. Method according to any one of embodiments 1 to 7, wherein said nucleic acid encoding an EMG1-like is of plant origin, preferably from a dicotyledonous plant, further preferably from the family Salicaceae, more preferably from the genus Populus, most preferably from Populus trichocarpa.
[0432] 9. Method according to any one of embodiments 1 to 8, wherein said nucleic acid encoding an EMG1-like polypeptide encodes any one of the polypeptides listed in Table A3 or is a portion of such a nucleic acid, or a nucleic acid capable of hybridising with such a nucleic acid.
[0433] 10. Method according to any one of embodiments 1 to 9, wherein said nucleic acid sequence encodes an orthologue or paralogue of any of the polypeptides given in Table A3.
[0434] 11. Method according to any one of embodiments 1 to 10, wherein said nucleic acid encodes the polypeptide represented by SEQ ID NO: 179.
[0435] 12. Method according to any one of embodiments 1 to 11, wherein said nucleic acid is operably linked to a constitutive promoter, preferably to a medium strength constitutive promoter, preferably to a plant promoter, more preferably to a GOS2 promoter, most preferably to a GOS2 promoter from rice.
[0436] 13. Plant, plant part thereof, including seeds, or plant cell, obtainable by a method according to any one of embodiments 1 to 12, wherein said plant, plant part or plant cell comprises a recombinant nucleic acid encoding an EMG1-like polypeptide as defined in any of embodiments 1 to 3 and 8 to 12.
[0437] 14. Construct comprising:
   [0438] (i) nucleic acid encoding an EMG1-like as defined in any of embodiments 1 to 3 and 8 to 12;
   [0439] (ii) one or more control sequences capable of driving expression of the nucleic acid sequence of (i); and optionally
   [0440] (iii) a transcription termination sequence.
[0441] 15. Construct according to embodiment 14, wherein one of said control sequences is a constitutive promoter, preferably a medium strength constitutive promoter, preferably to a plant promoter, more preferably a GOS2 promoter, most preferably a GOS2 promoter from rice.
[0442] 16. Use of a construct according to embodiment 14 or 15 in a method for making plants having enhanced yield-related traits, preferably increased yield relative to control plants, and more preferably increased seed yield and/or increased biomass relative to control plants.
[0443] 17. Plant, plant part or plant cell transformed with a construct according to embodiment 14 or 15.
[0444] 18. Method for the production of a transgenic plant having enhanced yield-related traits relative to control plants, preferably increased yield relative to control plants, and more preferably increased seed yield and/or increased biomass relative to control plants, comprising:
   [0445] (i) introducing and expressing in a plant cell or plant a nucleic acid encoding an EMG1-like polypeptide as defined in any of embodiments 1 to 3 and 8 to 12; and
   [0446] (ii) cultivating said plant cell or plant under conditions promoting plant growth and development.
[0447] 19. Transgenic plant having enhanced yield-related traits relative to control plants, preferably increased yield relative to control plants, and more preferably increased seed yield and/or increased biomass, resulting from modulated expression of a nucleic acid encoding an EMG1-like polypeptide as defined in any of embodiments 1 to 3 and 8 to 12 or a transgenic plant cell derived from said transgenic plant.
[0448] 20. Transgenic plant according to embodiment 13, 17 or 19, or a transgenic plant cell derived therefrom, wherein said plant is a crop plant, such as beet, sugarbeet or alfalfa; or a monocotyledonous plant such as sugarcane; or a cereal, such as rice, maize, wheat, barley, millet, rye, triticale, sorghum, emmer, spelt, einkorn, teff, milo or oats.
[0449] 21. Harvestable parts of a plant according to embodiment 20, wherein said harvestable parts are preferably shoot biomass and/or seeds.
[0450] 22. Products derived from a plant according to embodiment 20 and/or from harvestable parts of a plant according to embodiment 21.
[0451] 23. Use of a nucleic acid encoding an EMG1-like polypeptide as defined in any of embodiments 1 to 3 and 8 to 12 for enhancing yield-related traits in plants relative to control plants, preferably for increasing yield, and more preferably for increasing seed yield and/or for increasing biomass in plants relative to control plants.
[0452] 24. A method for manufacturing a product comprising the steps of growing the plants according to embodiment 13, 17, 19 or 20 and producing said product from or by said plants; or parts thereof, including seeds.

[0453] With respect to GPx-related polypeptides, the present invention moreover relates to the following specific embodiments:
[0454] 1. A method for enhancing yield-related traits in plants relative to or compared to control plants, comprising modulating expression in a plant of a nucleic acid encoding a GPx-related polypeptide, wherein said GPx-related polypeptide comprises one or more motifs and/or signatures having at least 80% sequence identity with a motif and/or signature selected from a group consisting of motifs 7 to 18, represented in SEQ ID NO: 361 to 372, respectively and/or one or more signatures 1 to 6 as represented in SEQ ID NO: 373 to 378, respectively.
[0455] 2. Method according to embodiment 1, wherein said modulated expression is effected by introducing and expressing in a plant said nucleic acid encoding said GPx-related polypeptide.
[0456] 3. Method according to embodiment 1 or 2, wherein said polypeptide is encoded by a nucleic acid molecule comprising a nucleic acid molecule selected from the group consisting of:
   [0457] (i) a nucleic acid represented by any one of SEQ ID NO: 292, 294, 296;
   [0458] (ii) the complement of a nucleic acid represented by any one of SEQ ID NO: 292, 294, 296;
   [0459] (iii) a nucleic acid encoding the polypeptide as represented by any one of SEQ ID NO: 293, 295, 297, preferably as a result of the degeneracy of the genetic code, said isolated nucleic acid can be deduced from a polypeptide sequence as represented by any one of SEQ ID NO: 293, 295, 297 and further preferably confers enhanced yield-related traits relative to or compared to control plants;
   [0460] (iv) a nucleic acid having, in increasing order of preference at least 30%, 31%, 32%, 33%, 34%, 35%, 36%, 37%, 38%, 39%, 40%, 41%, 42%, 43%, 44%, 45%, 46%, 47%, 48%, 49%, 50%, 51%, 52%, 53%, 54%, 55%, 56%, 57%, 58%, 59%, 60%, 61%, 62%, 63%, 64%, 65%, 66%, 67%, 68%, 69%, 70%, 71%, 72%, 73%, 74%, 75%, 76%, 77%, 78%, 79%, 80%, 81%, 82%, 83%, 84%, 85%, 86%, 87%, 88%, 89%, 90%, 91%, 92%, 93%, 94%, 95%, 96%, 97%, 98%, or 99% sequence identity with any of the nucleic acid sequences of SEQ ID NO: 292, 294, 296 and further preferably conferring enhanced yield-related traits relative to or compared to control plants, wherein the nucleic acid encodes a polypeptide that is not the polypeptide of any of the polypeptide sequence as represented by any one of SEQ ID NO: 293, 295, 297;
   [0461] (v) a first nucleic acid molecule which hybridizes with a second nucleic acid molecule of (i) to (iv) under stringent hybridization conditions and preferably confers enhanced yield-related traits relative to or compared to control plants, wherein the first nucleic acid encodes a polypeptide that is not the polypeptide of any of the polypeptide sequence as represented by any one of SEQ ID NO: 293, 295, 297;
   [0462] (vi) a nucleic acid encoding said polypeptide having, in increasing order of preference, at least 50%, 51%, 52%, 53%, 54%, 55%, 56%, 57%, 58%, 59%, 60%, 61%, 62%, 63%, 64%, 65%, 66%, 67%, 68%, 69%, 70%, 71%, 72%, 73%, 74%, 75%, 76%, 77%, 78%, 79%, 80%, 81%, 82%, 83%, 84%, 85%, 86%, 87%, 88%, 89%, 90%, 91%, 92%, 93%, 94%, 95%, 96%, 97%, 98%, or 99% sequence identity to the amino acid sequence represented by any one of SEQ ID NO: 293, 295, 297 and preferably conferring enhanced yield-related traits relative to or compared to control plants; or
   [0463] (vii) a nucleic acid comprising any combination(s) of features of (i) to (vi) above.
[0464] 4. Method to any one of embodiments 1 to 3, wherein said enhanced seed yield traits relative or compared to control plants comprise one or more of increased seed yield, increased seed size, increased total weight of seeds, increased number of total seeds, increased fill rate, increased number of filled seeds, number of florets per panicle on a plant, increased height of the plant, increased quick early development, harvest index, increased cycle time relative to or compared to control plants.
[0465] 5. Method according to any one of embodiments 1 to 4, wherein said increase in seed yield comprises an increase of at least 5% in said plant when compared to control plants for at least one of said parameters.
[0466] 6. Method according to any one of embodiments 1 to 5, wherein said enhanced yield-related traits are obtained under non-stress conditions.
[0467] 7. Method according to any one of embodiments 1 to 6, wherein said enhanced yield-related traits are obtained under abiotic stress conditions, preferably drought stress, salt stress or nitrogen deficiency.
[0468] 8. Method according to any one of embodiments 1 to 7, wherein said GPx-related polypeptide comprises one or more of the following motifs:
   [0469] (i) Motif 7 represented by SEQ ID NO: 361,
   [0470] (ii) Motif 8 represented by SEQ ID NO: 362,
   [0471] (iii) Motif 9 represented by SEQ ID NO: 363,
   [0472] (iv) Motif 10 represented by SEQ ID NO: 364,
   [0473] (v) Motif 11 represented by SEQ ID NO: 365,
   [0474] (vi) Motif 12 represented by SEQ ID NO: 366,
   [0475] (vii) Motif 13 represented by SEQ ID NO: 367,
   [0476] (viii) Motif 14 represented by SEQ ID NO: 368,
   [0477] (ix) Motif 15 represented by SEQ ID NO: 369,
   [0478] (x) Motif 16 represented by SEQ ID NO: 370,
   [0479] (xi) Motif 17 represented by SEQ ID NO: 371,
   [0480] (xii) Motif 18 represented by SEQ ID NO: 372.
[0481] 9. Method according to any one of embodiments 1 to 8, wherein said GPx-related polypeptide comprises one or more of the following signatures:
   [0482] (i) Signature 1 represented by SEQ ID NO: 373,
   [0483] (ii) Signature 2 represented by SEQ ID NO: 374,
   [0484] (iii) Signature 3 represented by SEQ ID NO: 375,
   [0485] (iv) Signature 4 represented by SEQ ID NO: 376,
   [0486] (v) Signature 5 represented by SEQ ID NO: 377,
   [0487] (vi) Signature 6 represented by SEQ ID NO: 378.
[0488] 10. Method according to any one of embodiments 1 to 9, wherein said nucleic acid encoding a GPx-related polypeptide is of plant origin, preferably from a dicotyledonous plant, further preferably from the family Poaceae, more preferably from the genus Oryza, most preferably from Oryza sativa.
[0489] 11. Method according to any one of embodiments 1 to 10, wherein said nucleic acid encoding a GPx-related polypeptide encodes any one of the polypeptides listed in Table A4 or is a portion of such a nucleic acid, or a nucleic acid capable of hybridising with such a nucleic acid.
[0490] 12. Method according to any one of embodiments 1 to 11, wherein said nucleic acid is operably linked to a constitutive promoter of plant origin, preferably to a medium strength constitutive promoter of plant origin, more preferably to a GOS2 promoter, most preferably to a GOS2 promoter from rice.
[0491] 13. Method according to any one of embodiments 1 to 12, wherein said plant is a monocotyledonous plant.
[0492] 14. Method according to embodiment 13, wherein said plant is a cereal.
[0493] 15. Plant, or part thereof, or plant cell, obtainable by a method according to any one of embodiments 1 to 14, wherein said plant, plant part or plant cell comprises a recombinant nucleic acid encoding a GPx-related polypeptide as defined in any one of embodiments 1 to 14.
[0494] 16. Construct comprising:
   [0495] (i) nucleic acid encoding an GPx-related polypeptide as defined in any one of embodiments 1 to 14;
   [0496] (ii) one or more control sequences capable of driving expression of the nucleic acid sequence of (i); and optionally
   [0497] (iii) a transcription termination sequence.
[0498] 17. Construct according to embodiment 16, wherein one of said control sequences is a constitutive promoter of plant origin, preferably to a medium strength constitutive promoter of plant origin, more preferably to a GOS2 promoter, most preferably to a GOS2 promoter from rice.
[0499] 18. Use of a construct according to embodiment 16 or 17 in a method for making plants having enhanced yield-related traits, preferably increased yield relative to or compared to control plants, and more preferably increased seed yield and/or increased biomass relative to or compared to control plants.
[0500] 19. Plant, plant part or plant cell transformed with a construct according to embodiment 16 or 17.
[0501] 20. Method for the production of a transgenic plant having enhanced yield-related traits relative to or compared to control plants, preferably increased yield relative to or compared to control plants, and more preferably increased seed yield and/or increased biomass relative to or compared to control plants, comprising:
   [0502] (i) introducing and expressing in a plant cell or plant a nucleic acid encoding a GPx-related polypeptide as defined in any one of embodiments 1 to 14; and
   [0503] (ii) cultivating said plant cell or plant under conditions promoting plant growth and development.
[0504] 21. Transgenic plant having enhanced yield-related traits relative to or compared to control plants, preferably increased yield relative to or compared to control plants, and more preferably increased seed yield and/or increased biomass, resulting from modulated expression of a nucleic acid encoding a GPx-related polypeptide as defined in any one of embodiments 1 to 14 or a transgenic plant cell derived from said transgenic plant.
[0505] 22. Transgenic plant according to embodiment 15, 19 or 21, or a transgenic plant cell derived therefrom, wherein said plant is a crop plant, such as beet, sugarbeet or alfalfa; or a monocotyledonous plant such as sugarcane; or a cereal, such as rice, maize, wheat, barley, millet, rye, triticale, sorghum, emmer, spelt, einkorn, teff, milo or oats.
[0506] 23. Harvestable parts of a plant according to embodiment 22, wherein said harvestable parts are preferably biomass and/or seeds.
[0507] 24. Products derived from a plant according to embodiment 22 and/or from harvestable parts of a plant according to embodiment 23.
[0508] 25. Use of a nucleic acid encoding an GPx-related polypeptide as defined in any one of embodiments 1 to 14 for enhancing yield-related traits in plants relative to or compared to control plants, preferably for increasing yield, and more preferably for increasing seed yield and/or for increasing biomass in plants relative to or compared to control plants.
[0509] 26. A method for manufacturing a product comprising the steps of growing the plants according to embodiment 15, 19 or 21 and producing said product from or by said plants; or parts thereof, including seeds.

### DESCRIPTION OF FIGURES

[0510] The present invention will now be described with reference to the following figures in which:

[0511] FIG. 1 represents the domain structure of SEQ ID NO: 2 with conserved ELM2-related domain and the three MEME motifs.

[0512] FIG. 2 represents the domain structure of SEQ ID NO: 4 with conserved ELM2-related domain and the three MEME motifs.

[0513] FIG. 3 represents a multiple alignment of various ELM2-related polypeptides. These alignments can be used for defining further motifs or signature sequences, when using conserved amino acids.

[0514] The corresponding SEQ ID NO's for the aligned polypeptide sequences shown in FIG. 3 are:
[0515] SEQ ID NO: 6 for A.thaliana_AT2G46040.1#1
[0516] SEQ ID NO: 8 for A.thaliana_AT4G11400.1#1
[0517] SEQ ID NO: 10 for G.hirsutum_ES795168 #1
[0518] SEQ ID NO: 12 for G.max_Glyma07g07530.1#1
[0519] SEQ ID NO: 24 for P.persica_TC15862#1
[0520] SEQ ID NO: 40 for V.vinifera_GSVIVT00026942001#1
[0521] SEQ ID NO: 16 for G.max_Glyma09g39360.1#1
[0522] SEQ ID NO: 18 for G.max_Glyma18g46950.1#1
[0523] SEQ ID NO: 4 for M.truncatula_AC149204_{—}12.4#1
[0524] SEQ ID NO: 26 for P.trichocarpa_{—}572279#1
[0525] SEQ ID NO: 2 for Poptr_ELM2-related
[0526] SEQ ID NO: 28 for P.trichocarpa_{—}751302#1
[0527] SEQ ID NO: 30 for P.trichocarpa_{—}757535#1
[0528] SEQ ID NO: 38 for V.vinifera_GSVIVT00002575001#1
[0529] SEQ ID NO: 20 for O.sativa_LOC_Os04g08410.1#1
[0530] SEQ ID NO: 32 for P.virgatum_TC11466#1
[0531] SEQ ID NO: 36 for S.bicolor_Sb06g001680.1#1
[0532] SEQ ID NO: 44 for Zea_{—}mays_GRMZM2G424651_T01#1
[0533] SEQ ID NO: 14 for G.max_Glyma08g01950.1 #1
[0534] SEQ ID NO: 22 for O.sativa_LOC_Os10g30944.2#1
[0535] SEQ ID NO: 34 for S.bicolor_Sb01g020470.1#1
[0536] SEQ ID NO: 42 for Zea_{—}mays_GRMZM2G365731_T01#1

[0537] FIG. 4 shows a phylogenetic tree of ELM2-related polypeptides, as described in example 2.

[0538] FIG. 5 shows the MATGAT table of Example 3 of the full length sequences of Table A1.

[0539] FIG. 6 shows the MATGAT table of Example 3 of the conserved ELM2-domain in the sequences of Table A1.

[0540] FIG. 7 represents the binary vector used for increased expression in Oryza sativa of an ELM2-related-encoding nucleic acid under the control of a rice GOS2 promoter (pGOS2).

[0541] FIG. 8 shows the domain structure of WRKY-related polypeptide as represented by SEQ ID NO: 2. Coiled coil sequence is represented by amino acids LMNLYF (indicated in bold, underlined); basic motif as NLS is represented by KKAR (indicated in bold, italic, underlined); C2H2 zinc finger (represented by amino acids CCHH (bold, underlined)) containing the WRKY motif (WRKYGQK motif (bold, underlined)) represented by amino acid sequence indicated in bold.

[0542] FIG. 9 represents the binary vector used for increased expression in Oryza sativa of WRKY-related polypeptide-encoding nucleic acid under the control of a rice GOS2 promoter (pGOS2).

[0543] FIG. 10 shows the MATGAT table of Example 3.

[0544] FIG. 11 represents the domain structure of SEQ ID NO: 179 with conserved motifs 4, 5 and 6 and the EMG1 domain.

[0545] FIG. 12 represents a multiple alignment of various EMG1-like polypeptides. These alignments can be used for defining further motifs or signature sequences, when using conserved amino acids.

[0546] The corresponding SEQ ID NO's for the aligned polypeptide sequences shown in FIG. 12 are:
[0547] SEQ ID NO: 267 for T.aestivum_TC329781
[0548] SEQ ID NO: 233 for T.aestivum_TC342076
[0549] SEQ ID NO: 221 for H.vulgare_TC168675
[0550] SEQ ID NO: 237 for O.sativa_LOC_Os02g18830.1
[0551] SEQ ID NO: 227 for P.virgatum_TC36436
[0552] SEQ ID NO: 231 for Z.mays_GRMZM2G130339_T02
[0553] SEQ ID NO: 229 for S.bicolor_Sb04g033060.1
[0554] SEQ ID NO: 225 for S.bicolor_Sb04g011280.1
[0555] SEQ ID NO: 219 for C.longa_TA2440_{—}136217
[0556] SEQ ID NO: 251 for Y.filamentosa_DT581455
[0557] SEQ ID NO: 209 for A.sp_TC27214
[0558] SEQ ID NO: 253 for P.patens_{—}46413
[0559] SEQ ID NO: 249 for P.patens_TC42118
[0560] SEQ ID NO: 247 for S.moellendorffii_{—}407397
[0561] SEQ ID NO: 269 for A.trichopoda_CK754382
[0562] SEQ ID NO: 261 for P.taeda_TA10927_{—}3352
[0563] SEQ ID NO: 243 for P.glauca_TA18327_{—}3330
[0564] SEQ ID NO: 241 for P.sitchensis_TA12989_{—}3332
[0565] SEQ ID NO: 277 for P.glauca_CO481519
[0566] SEQ ID NO: 239 for C.japonica_TA2268_{—}3369
[0567] SEQ ID NO: 211 for M.truncatula_CU012050_{—}19.4
[0568] SEQ ID NO: 203 for L.japonicus_TC43316
[0569] SEQ ID NO: 217 for G.max_Glyma12g02820.2
[0570] SEQ ID NO: 207 for G.max_TC278049
[0571] SEQ ID NO: 235 for G.max_Glyma12g02820.5
[0572] SEQ ID NO: 205 for G.max_Glyma11g10520.1
[0573] SEQ ID NO: 201 for G.max_Glyma12g02820.1
[0574] SEQ ID NO: 263 for P.coccineus_TA3737_{—}3886
[0575] SEQ ID NO: 259 for P.coccineus_TC15108
[0576] SEQ ID NO: 193 for P.vulgaris_TC10901
[0577] SEQ ID NO: 265 for C.sinensis_TC22219
[0578] SEQ ID NO: 271 for G.hirsutum_ES833864
[0579] SEQ ID NO: 185 for G.raimondii_TC1038
[0580] SEQ ID NO: 183 for P.trichocarpa_{—}667309
[0581] SEQ ID NO: 181 for P.trichocarpa_{—}831805
[0582] SEQ ID NO: 179 for P.trichocarpa EMG1-like
[0583] SEQ ID NO: 187 for P.trifoliata_TA8498_{—}37690
[0584] SEQ ID NO: 213 for G.hirsutum_TC158561
[0585] SEQ ID NO: 245 for E.esula_TC3222
[0586] SEQ ID NO: 223 for E.esula_DV156953
[0587] SEQ ID NO: 189 for V.vinifera_GSVIVT00033904001
[0588] SEQ ID NO: 199 for B.napus_TC70157
[0589] SEQ ID NO: 195 for B.napus_TC76938
[0590] SEQ ID NO: 197 for A.thaliana_AT3G57000.1
[0591] SEQ ID NO: 191 for A.Iyrata_{—}486143
[0592] SEQ ID NO: 275 for P.americana_CV001201
[0593] SEQ ID NO: 255 for M.crystallinum_TC9042
[0594] SEQ ID NO: 279 for V.carteri_{—}106743
[0595] SEQ ID NO: 273 for C.reinharditii_{—}178371
[0596] SEQ ID NO: 285 for M.sp_{—}77569
[0597] SEQ ID NO: 283 for O.lucimarinus_{—}39810
[0598] SEQ ID NO: 281 for O.sp_{—}18991
[0599] SEQ ID NO: 277 for O.tauri_{—}37777
[0600] SEQ ID NO: 215 for A.officinalis_TA1655_{—}4686

[0601] FIG. 13 shows a phylogenetic tree of EMG1-like polypeptides, as described in Example 2.

[0602] FIG. 14 shows the MATGAT table of Example 3 over the full length of the sequences of Table A3.

[0603] FIG. 5 shows the MATGAT table of Example 3 over the EMG1-like domain of the sequences of Table A3.

[0604] FIG. 16 represents the binary vector used for increased expression in Oryza sativa of an EMG1-like-encoding nucleic acid under the control of a rice GOS2 promoter (pGOS2).

[0605] FIG. 17 represents the domain structure of SEQ ID NO: 293 with conserved motifs.

[0606] FIG. 18 represents the binary vector used for increased expression in Oryza sativa of a GPx-related-encoding nucleic acid under the control of a rice GOS2 promoter (pGOS2).

[0607] FIG. 19 shows the MATGAT table of Example 3.

[0608] FIG. 20 represents a multiple alignment of various GPx-related polypeptides. The asterisks indicate identical amino acids among the various protein sequences, colons represent highly conserved amino acid substitutions, and the dots represent less conserved amino acid substitution; on other positions there is no sequence conservation. These alignments can be used for defining further motifs or signature sequences, when using conserved amino acids.

[0609] FIG. 21 shows phylogenetic tree of GPx-related polypeptides. SEQ ID NO: 293 as used and described herein is Oryza_{—}sativa_OsGPx03 gene from Oryza sativa and indicated by an arrow in the tree. SEQ ID NO: 295 as used and described herein is Populus_{—}trichocarpa_PtGPx06 gene from Populus trichocarpa and indicated by an arrow in the tree. SEQ ID NO: 297 as used and described herein is Populus_{—}trichocarpa_GPx gene from Populus trichocarpa and indicated by an arrow in the tree.

### EXAMPLES

[0610] The present invention will now be described with reference to the following examples, which are by way of illustration only. The following examples are not intended to limit the scope of the invention. Unless otherwise indicated, the present invention employs conventional techniques and methods of plant biology, molecular biology, bioinformatics and plant breedings.

[0611] DNA manipulation: unless otherwise stated, recombinant DNA techniques are performed according to standard protocols described in (Sambrook (2001) Molecular Cloning: a laboratory manual, 3rd Edition Cold Spring Harbor Laboratory Press, CSH, New York) or in Volumes 1 and 2 of Ausubel et al. (1994), Current Protocols in Molecular Biology, Current Protocols. Standard materials and methods for plant molecular work are described in Plant Molecular Biology Labfax (1993) by R. D. D. Croy, published by BIOS Scientific Publications Ltd (UK) and Blackwell Scientific Publications (UK).

### Example 1

### Identification of Sequences Related to the Nucleic Acid Sequence Used in the Methods of Intervention

### 1. ELM2-Related Polypeptides

[0612] Sequences (full length cDNA, ESTs or genomic) related to SEQ ID NO: 1 and SEQ ID NO: 2 were identified amongst those maintained in the Entrez Nucleotides database at the National Center for Biotechnology Information (NCBI) using database sequence search tools, such as the Basic Local Alignment Tool (BLAST) (Altschul et al. (1990) J. Mol. Biol. 215:403-410; and Altschul et al. (1997) Nucleic Acids Res. 25:3389-3402). The program is used to find regions of local similarity between sequences by comparing nucleic acid or polypeptide sequences to sequence databases and by calculating the statistical significance of matches. For example, the polypeptide encoded by the nucleic acid of SEQ ID NO: 1 was used for the TBLASTN algorithm, with default settings and the filter to ignore low complexity sequences set off. The output of the analysis was viewed by pairwise comparison, and ranked according to the probability score (E-value), where the score reflect the probability that a particular alignment occurs by chance (the lower the E-value, the more significant the hit). In addition to E-values, comparisons were also scored by percentage identity. Percentage identity refers to the number of identical nucleotides (or amino acids) between the two compared nucleic acid (or polypeptide) sequences over a particular length. In some instances, the default parameters may be adjusted to modify the stringency of the search. For example the E-value may be increased to show less stringent matches. This way, short nearly exact matches may be identified.

[0613] Table A1 provides a list of nucleic acid and polypeptide sequences related to SEQ ID NO: 1 and SEQ ID NO: 2.

TABLE A1
Examples of ELM2-related nucleic acids and polypeptides:

| | Nucleic acid | Protein |
|---|---|---|
| Plant Source | SEQ ID NO: | SEQ ID NO: |
| Poptr_ELM2 related | 1 | 2 |
| M. truncatula_AC149204_12.4#1 | 3 | 4 |
| A. thaliana_AT2G46040.1#1 | 5 | 6 |
| A. thaliana_AT4G11400.1#1 | 7 | 8 |
| G. hirsutum_ES795168#1 | 9 | 10 |
| G. max_Glyma07g07530.1#1 | 11 | 12 |
| G. max_Glyma08g01950.1#1 | 13 | 14 |
| G. max_Glyma09g39360.1#1 | 15 | 16 |
| G. max_Glyma18g46950.1#1 | 17 | 18 |
| O. sativa_LOC_Os04g08410.1#1 | 19 | 20 |
| O. sativa_LOC_Os10g30944.2#1 | 21 | 22 |
| P. persica_TC15862#1 | 23 | 24 |
| P. trichocarpa_572279#1 | 25 | 26 |
| P. trichocarpa_751302#1 | 27 | 28 |
| P. trichocarpa_757535#1 | 29 | 30 |
| P. virgatum_TC11466#1 | 31 | 32 |
| S. bicolor_Sb01g020470.1#1 | 33 | 34 |
| S. bicolor_Sb06g001680.1#1 | 35 | 36 |
| V. vinifera_GSVIVT00002575001#1 | 37 | 38 |
| V. vinifera_GSVIVT00026942001#1 | 39 | 40 |
| Zea_mays_GRMZM2G365731_T01#1 | 41 | 42 |
| Zea_mays_GRMZM2G424651_T01#1 | 43 | 44 |

### 2. WRKY-Related Polypeptides

[0614] Sequences (full length cDNA, ESTs or genomic) related to SEQ ID NO: 102 and SEQ ID NO: 103 were identified amongst those maintained in the Entrez Nucleotides database at the National Center for Biotechnology Information (NCBI) using database sequence search tools, such as the Basic Local Alignment Tool (BLAST) (Altschul et al. (1990) J. Mol. Biol. 215:403-410; and Altschul et al. (1997) Nucleic Acids Res. 25:3389-3402). The program is used to find regions of local similarity between sequences by comparing nucleic acid or polypeptide sequences to sequence databases and by calculating the statistical significance of matches. For example, the polypeptide encoded by the nucleic acid of SEQ ID NO: 102 was used for the TBLASTN algorithm, with default settings and the filter to ignore low complexity sequences set off. The output of the analysis was viewed by pairwise comparison, and ranked according to the probability score (E-value), where the score reflect the probability that a particular alignment occurs by chance (the lower the E-value, the more significant the hit). In addition to E-values, comparisons were also scored by percentage identity. Percentage identity refers to the number of identical nucleotides (or amino acids) between the two compared nucleic acid (or polypeptide) sequences over a particular length. In some instances, the default parameters may be adjusted to modify the stringency of the search. For example the E-value may be increased to show less stringent matches. This way, short nearly exact matches may be identified.

[0615] Table A2 provides a list of nucleic acid and polypeptide sequences related to SEQ ID NO: 102 and SEQ ID NO: 103.

TABLE A2
Examples of WRKY-related polypeptide nucleic acids and polypeptides:

| | Nucleic acid | Protein |
|---|---|---|
| Plant Source | SEQ ID NO: | SEQ ID NO: |
| Medicago truncatula | 102 | 103 |
| AL6G14950 | 104 | 105 |
| AT5G15130 | 106 | 107 |
| BD1G51030 | 108 | 109 |
| CP00014G00310 | 110 | 111 |
| CP00017G01970 | 112 | 113 |
| GM04G34220 | 114 | 115 |
| GM05G01280 | 116 | 117 |
| GM06G20300 | 118 | 119 |
| GM09G37470 | 120 | 121 |
| GM17G10630 | 122 | 123 |
| GM18G49140 | 124 | 125 |
| GM19G02440 | 126 | 127 |
| LJ1G009790 | 128 | 129 |
| LJ1G030000 | 130 | 131 |
| MD00G099380 | 132 | 133 |
| MD00G142380 | 134 | 135 |
| MD00G204530 | 136 | 137 |
| MD00G279080 | 138 | 139 |
| MD06G015440 | 140 | 141 |
| MD06G015480 | 142 | 143 |
| MD17G003750 | 144 | 145 |
| ME02615G00410 | 146 | 147 |
| ME04264G00010 | 148 | 149 |
| ME10261G00730 | 150 | 151 |
| MT7G02120 | 152 | 153 |
| MT8G38070 | 154 | 155 |
| OS06G05380 | 156 | 157 |
| OSINDICA_06G04630 | 158 | 159 |
| PT15G06580 | 160 | 161 |
| PT17G11190 | 162 | 163 |
| RC29822G01580 | 164 | 165 |
| RC30147G07590 | 166 | 167 |
| VV14G01690 | 168 | 169 |
| VV17G04040 | 170 | 171 |
| ZM03G02190 | 172 | 173 |

### 3. EMG1-Like Polypeptides

[0616] Sequences (full length cDNA, ESTs or genomic) related to SEQ ID NO: 178 and SEQ ID NO: 179 were identified amongst those maintained in the Entrez Nucleotides database at the National Center for Biotechnology Information (NCBI) using database sequence search tools, such as the Basic Local Alignment Tool (BLAST) (Altschul et al. (1990) J. Mol. Biol. 215:403-410; and Altschul et al. (1997) Nucleic Acids Res. 25:3389-3402). The program is used to find regions of local similarity between sequences by comparing nucleic acid or polypeptide sequences to sequence databases and by calculating the statistical significance of matches. For example, the polypeptide encoded by the nucleic acid of SEQ ID NO: 178 was used for the TBLASTN algorithm, with default settings and the filter to ignore low complexity sequences set off. The output of the analysis was viewed by pairwise comparison, and ranked according to the probability score (E-value), where the score reflect the probability that a particular alignment occurs by chance (the lower the E-value, the more significant the hit). In addition to E-values, comparisons were also scored by percentage identity. Percentage identity refers to the number of identical nucleotides (or amino acids) between the two compared nucleic acid (or polypeptide) sequences over a particular length. In some instances, the default parameters may be adjusted to modify the stringency of the search. For example the E-value may be increased to show less stringent matches. This way, short nearly exact matches may be identified.

[0617] Table A3 provides a list of nucleic acid and protein sequences related to SEQ ID NO: 178 and SEQ ID NO: 179.

TABLE A3
Examples of EMG1-like nucleic acids and polypeptides:

| | Nucleic acid | Protein |
|---|---|---|
| Plant Source | SEQ ID NO: | SEQ ID NO: |
| P. trichocarpa | 178 | 179 |
| P. trichocarpa | 180 | 181 |
| P. trichocarpa | 182 | 183 |
| G. raimondii | 184 | 185 |
| P. trifoliata | 186 | 187 |
| V. vinifera | 188 | 189 |
| A. lyrata | 190 | 191 |
| P. vulgaris | 192 | 193 |
| B. napus | 194 | 195 |
| A. thaliana | 196 | 197 |
| B. napus | 198 | 199 |
| G. max | 200 | 201 |
| L. japonicus | 202 | 203 |
| G. max | 204 | 205 |
| G. max | 206 | 207 |
| Aquilegia_sp_2.1 | 208 | 209 |
| M. truncatula | 210 | 211 |
| G. hirsutum | 212 | 213 |
| A. officinalis | 214 | 215 |
| G. max | 216 | 217 |
| C. longa | 218 | 219 |
| H. vulgare | 220 | 221 |
| E. esula | 222 | 223 |
| S. bicolor | 224 | 225 |
| P. virgatum | 226 | 227 |
| S. bicolor | 228 | 229 |
| Z. mays | 230 | 231 |
| T. aestivum | 232 | 233 |
| G. max | 234 | 235 |
| O. sativa | 236 | 237 |
| C. japonica | 238 | 239 |
| P. sitchensis | 240 | 241 |
| P. glauca | 242 | 243 |
| E. esula | 244 | 245 |
| S. moellendorffii | 246 | 247 |
| P. patens | 248 | 249 |
| Y. filamentosa | 250 | 251 |
| P. patens | 252 | 253 |
| M. crystallinum | 254 | 255 |
| P. glauca | 256 | 257 |
| P. coccineus | 258 | 259 |
| P. taeda | 260 | 261 |
| P. coccineus | 262 | 263 |
| C. sinensis | 264 | 265 |
| T. aestivum | 266 | 267 |
| A. trichopoda | 268 | 269 |
| G. hirsutum | 270 | 271 |
| C. reinharditii | 272 | 273 |
| P. americana | 274 | 275 |
| O. tauri | 276 | 277 |
| V. carteri | 278 | 279 |
| Ostreococcus_RCC809_1_JGI | 280 | 281 |
| O. lucimarinus | 282 | 283 |
| Micromonas_RCC299_3_JGI | 284 | 285 |

### 4. GPx-Related Polypeptides

[0618] Sequences (full length cDNA, ESTs or genomic) related to SEQ ID NOs: 292 to 297 were identified amongst those maintained in the Entrez Nucleotides database at the National Center for Biotechnology Information (NCBI) using database sequence search tools, such as the Basic Local Alignment Tool (BLAST) (Altschul et al. (1990) J. Mol. Biol. 215:403-410; and Altschul et al. (1997) Nucleic Acids Res. 25:3389-3402). The program is used to find regions of local similarity between sequences by comparing nucleic acid or polypeptide sequences to sequence databases and by calculating the statistical significance of matches. For example, the polypeptide encoded by the nucleic acid of SEQ ID NO: 292 was used for the TBLASTN algorithm, with default settings and the filter to ignore low complexity sequences set off. The output of the analysis was viewed by pairwise comparison, and ranked according to the probability score (E-value), where the score reflect the probability that a particular alignment occurs by chance (the lower the E-value, the more significant the hit). In addition to E-values, comparisons were also scored by percentage identity. Percentage identity refers to the number of identical nucleotides (or amino acids) between the two compared nucleic acid (or polypeptide) sequences over a particular length. In some instances, the default parameters may be adjusted to modify the stringency of the search. For example the E-value may be increased to show less stringent matches. This way, short nearly exact matches may be identified.

[0619] Table A4 provides a list of nucleic acid and polypeptide sequences related to SEQ ID NOs: 293 to 297.

TABLE A4
Examples of GPx-related nucleic acids and polypeptides:

| | | Protein |
|---|---|---|
| | Nucleic acid | SEQ ID |
| Plant source | SEQ ID NO: | NO: |
| Oryza_sativa_OsGPx03 | 292 | 293 |
| Populus_trichocarpa_PtGPx06 | 294 | 295 |
| Populus_trichocarpa_PtGPx | 296 | 297 |
| Zea_mays_ZmGPx03 | 298 | 299 |
| Zea_mays_ZmGPx01-2 | 300 | 301 |
| Zea_mays_ZmGPx01 | 302 | 303 |
| Triticum_monococcum_TmGPx01 | | 304 |
| Triticum_aestivum_TaGPx03 | | 305 |
| Triticum_aestivum_TaGPx01 | 306 | 307 |
| Setaria_italica_SiGPx01 | 308 | 309 |
| Sorghum_bicolor_SbGPx06 | 310 | 311 |
| Sorghum_bicolor_SbGPx03 | 312 | 313 |
| Sorghum_bicolor_SbGPx01 | 314 | 315 |
| Oryza_sativas_OsGPx06 | 316 | 317 |
| Oryza_sativas_OsGPx01 | 318 | 319 |
| Hordeum_vulgare_HvGPx06 | 320 | 321 |
| Hordeum_vulgare_HvGPx03 | 322 | 323 |
| Hordeum_vulgare_HvGPx01 | 324 | 325 |
| Pinus_taeda_PtaGPx06-2 | | 326 |
| Pinus_taeda_PtaGPx06-1 | | 327 |
| Pinus_pinaster_PpGPx06-2 | | 328 |
| Gnetum_gnemon_GgGPx06 | | 329 |
| Zea_mays_ZmGPx03-2 | 330 | 331 |
| Vitis_vinifera_VvGPx06 | | 332 |
| Solanum_tuberosum_StGPx06 | | 333 |
| Spinacia_oleracea_SoGPx06 | | 334 |
| Populus_trichocarpa_PtGPx06-2 | 335 | 336 |
| Nicotiana_tabacum_NtGPx06 | | 337 |
| Nicotiana_sylvestris_NsGPx06 | | 338 |
| Medicago_truncatula_MtGPx06 | | 339 |
| Malus_domestica_MdGPx06 | | 340 |
| Mesembryanthemum_crystallinum_McGPx06 | | 341 |
| Lotus_japonicus_LjGPx06 | | 342 |
| Lycopersicon_esculentum_LeGPx06 | | 343 |
| Hevea_brasiliensis_HbGPx06 | | 344 |
| Helianthus_annuus_HaGPx06-3_ANN1312 | | 345 |
| Helianthus_annuus_HaGPx06-1 | | 346 |
| Gossypium_hirsutum_GhGPx06-3 | | 347 |
| Gossypium_hirsutum_GhGPx06-2 | | 348 |
| Gossypium_hirsutum_GhGPx06-1 | 349 | 350 |
| Citrus_sinensis_CsGPx06 | | 351 |
| Cucumis_melo_CmGPx06 | | 352 |
| Capsicum_chinense_CcGPx06 | | 353 |
| Brassica_napus_BnGPx06-2 | | 354 |
| Brassica_napus_BnGPx06-1 | | 355 |
| Arabidopsis_thaliana_AtGPx06 | 356 | 357 |
| Populus_trichocarpa_PtGPx01 | 358 | 359 |
| Solanum_tuberosum_StGPx08-2 | | 360 |

[0620] Sequences have been tentatively assembled and publicly disclosed by research institutions, such as The Institute for Genomic Research (TIGR; beginning with TA). For instance, the Eukaryotic Gene Orthologs (EGO) database may be used to identify such related sequences, either by keyword search or by using the BLAST algorithm with the nucleic acid sequence or polypeptide sequence of interest. Special nucleic acid sequence databases have been created for particular organisms, e.g. for certain prokaryotic organisms, such as by the Joint Genome Institute. Furthermore, access to proprietary databases, has allowed the identification of novel nucleic acid and polypeptide sequences.

### Example 2

### Alignment of Sequences to the Polypeptide Sequences Used in the Methods of the Invention

### 1. ELM2-Related Polypeptides

[0621] Alignment of the polypeptide sequences was performed using MAFFT (version 6.624, L-INS-I method). The ELM2-related polypeptides are aligned in FIG. 3.

[0622] A phylogenetic tree of ELM2-related polypeptides (FIG. 4) was constructed by aligning ELM2-related sequences using MAFFT (Katoh and Toh (2008)—Briefings in Bioinformatics 9:286-298). A neighbour-joining tree was calculated using Quick-Tree (Howe et al. (2002), Bioinformatics 18(11): 1546-7), 100 bootstrap repetitions. The dendrogram was drawn using Dendroscope (Huson et al. (2007), BMC Bioinformatics 8(1):460). Confidence levels for 100 bootstrap repetitions are indicated for major branchings.

### 2. WRKY-Related Polypeptides

[0623] Alignment of the polypeptide sequences is performed using the ClustalW 2.0 algorithm of progressive alignment (Thompson et al. (1997) Nucleic Acids Res 25:4876-4882; Chenna et al. (2003). Nucleic Acids Res 31:3497-3500) with standard setting (slow alignment, similarity matrix: Gonnet, gap opening penalty 10, gap extension penalty: 0.2). Minor manual editing was done to further optimise the alignment. In this context, the sequence as shown in FIG. 8 can be used for alignment by the skilled person in order to identify homologues of WRKY-related polypeptide sequences.

### 3. EMG1-Like Polypeptides

[0624] Alignment of the polypeptide sequences was performed using the ClustalW 2.0 algorithm of progressive alignment (Thompson et al. (1997) Nucleic Acids Res 25:4876-4882; Chenna et al. (2003). Nucleic Acids Res 31:3497-3500) with standard setting (slow alignment, similarity matrix: Gonnet, gap opening penalty 10, gap extension penalty: 0.2). Minor manual editing was done to further optimise the alignment. The EMG1-like polypeptides are aligned in FIG. 12.

[0625] A phylogenetic tree of EMG1-like polypeptides (FIG. 13) was constructed by aligning EMG1-like sequences using MAFFT (Katoh and Toh (2008)—Briefings in Bioinformatics 9:286-298). A neighbour-joining tree was calculated using Quick-Tree (Howe et al. (2002), Bioinformatics 18(11): 1546-7), 100 bootstrap repetitions. The dendrogram was drawn using Dendroscope (Huson et al. (2007), BMC Bioinformatics 8(1):460). Confidence levels for 100 bootstrap repetitions are indicated for major branchings.

### 4. GPx-Related Polypeptides

[0626] Alignment of the polypeptide sequences was performed using the ClustalW 2.0 algorithm of progressive alignment (Thompson et al. (1997) Nucleic Acids Res 25:4876-4882; Chenna et al. (2003). Nucleic Acids Res 31:3497-3500) with standard setting (slow alignment, similarity matrix: Gonnet, gap opening penalty 10, gap extension penalty: 0.2). Minor manual editing was done to further optimise the alignment. The GPx-related polypeptides are aligned in FIG. 20.

[0627] A phylogenetic tree of GPx-related polypeptides (FIG. 21) was constructed by aligning GPx-related sequences using MAFFT (Katoh and Toh (2008)—Briefings in Bioinformatics 9:286-298) with default settings. A neighbour-joining tree was calculated using Quick-Tree (Howe et al. (2002), Bioinformatics 18(11): 1546-7), 100 bootstrap repetitions. The dendrogram was drawn using Dendroscope (Huson et al. (2007), BMC Bioinformatics 8(1):460). Confidence levels for 100 bootstrap repetitions are indicated for major branchings.

### Example 3

### Calculation of Global Percentage Identity Between Polypeptide Sequences

[0628] Global percentages of similarity and identity between full length polypeptide sequences useful in performing the methods of the invention were determined using MatGAT (Matrix Global Alignment Tool) software (BMC Bioinformatics. 2003 4:29. MatGAT: an application that generates similarity/identity matrices using protein or DNA sequences. Campanella J J, Bitincka L, Smalley J; software hosted by Ledion Bitincka). MatGAT generates similarity/identity matrices for DNA or protein sequences without needing pre-alignment of the data. The program performs a series of pair-wise alignments using the Myers and Miller global alignment algorithm, calculates similarity and identity, and then places the results in a distance matrix.

### 1. ELM2-Related Polypeptides

[0629] Results of the MatGAT analysis are shown in FIG. 5 with global similarity and identity percentages over the full length of the polypeptide sequences. Sequence similarity is shown in the bottom half of the dividing line and sequence identity is shown in the top half of the diagonal dividing line. Parameters used in the analysis were: Scoring matrix: Blosum62, First Gap: 12, Extending Gap: 2. The sequence identity (in %) between the ELM2-related polypeptide sequences useful in performing the methods of the invention can be as low as 9%, is generally higher than 9%, compared to SEQ ID NO: 2.

[0630] The results of the MatGat analysis for the conserved ELM2 domain, according to an Interpro accession IPR 000949, according to PFAM accession number PF01448 ELM2 domain, of the ELM2-related polypeptide sequences are shown in FIG. 6. Sequence similarity is shown in the bottom half of the dividing line and sequence identity is shown in the top half of the diagonal dividing line. Parameters used in the analysis were: Scoring matrix: Blosum62, First Gap: 12, Extending Gap: 2. When percentage identity analysis is performed on the conserved domain instead of on the full length polypeptide sequences, an increase in percentage identity is observed as shown in FIG. 6. Lowest values are now above 30% compared to SEQ ID NO: 2. Note that P. virgatum does not have an ELM2 domain, as can be seen in the alignment in FIG. 3.

### 2. WRKY-Related Polypeptides

[0631] Results of the MatGAT analysis are shown in FIG. 10 with global similarity and identity percentages over the full length of the polypeptide sequences. Sequence similarity is shown in the bottom half of the dividing line and sequence identity is shown in the top half of the diagonal dividing line. Parameters used in the analysis were: Scoring matrix: Blosum62, First Gap: 12, Extending Gap: 2. The sequence identity (in %) between the WRKY-related polypeptide sequences useful in performing the methods of the invention can be as low as 34% compared to SEQ ID NO: 103.

[0632] A MATGAT table for local alignment of a specific domain, or data on % identity/similarity between specific domains may also be included.

### 3. EMG1-Like Polypeptides

[0633] Results of the MatGAT analysis are shown in FIG. 14 with global similarity and identity percentages over the full length of the polypeptide sequences. Sequence similarity is shown in the bottom half of the dividing line and sequence identity is shown in the top half of the diagonal dividing line. Parameters used in the analysis were: Scoring matrix: Blosum62, First Gap: 12, Extending Gap: 2. The sequence identity (in %) between the EMG1-like polypeptide sequences useful in performing the methods of the invention can be as low as 17.6%, but is generally higher than 17.6% compared to SEQ ID NO: 179.

[0634] Results of a MATGAT analysis for the EMG1-like domain of the sequences of Table A3 are shown in FIG. 15. Sequence similarity is shown in the bottom half of the dividing line and sequence identity is shown in the top half of the diagonal dividing line. Parameters used in the analysis were: Scoring matrix: Blosum62, First Gap: 12, Extending Gap: 2. The sequence identity (in %) over the EMG1-like domain between the EMG1-like polypeptide sequences useful in performing the methods of the invention can be as low as 12.2%, but is generally higher than 50% compared to SEQ ID NO: 179.

### 4. GPx-Related Polypeptides

[0635] Results of the MatGAT analysis are shown in FIG. 19 with global similarity and identity percentages over the full length of the polypeptide sequences. Sequence similarity is shown in the bottom half of the dividing line and sequence identity is shown in the top half of the diagonal dividing line. Parameters used in the analysis were: Scoring matrix: Blosum62, First Gap: 12, Extending Gap: 2. The sequence identity (in %) between the GPx-related polypeptide sequences useful in performing the methods of the invention can be as low as 50% compared to SEQ ID NO: 293, 50% compared to SEQ ID NO: 295, 46% compared to SEQ ID NO: 297.

[0636] Like for full length sequences, a MATGAT table based on subsequences of a specific domain, may be generated. Based on a multiple alignment of GPx-related polypeptides, such as for example the one of Example 2, a skilled person may select conserved sequences and submit as input for a MaTGAT analysis. This approach is useful where overall sequence conservation among GPx-related proteins is rather low.

### Example 4

### Identification of Domains Comprised in Polypeptide Sequences Useful in Performing the Methods of the Invention

[0637] The Integrated Resource of Protein Families, Domains and Sites (InterPro) database is an integrated interface for the commonly used signature databases for text- and sequence-based searches. The InterPro database combines these databases, which use different methodologies and varying degrees of biological information about well-characterized proteins to derive protein signatures. Collaborating databases include SWISS-PROT, PROSITE, TrEMBL, PRINTS, ProDom and Pfam, Smart and TIGRFAMs. Pfam is a large collection of multiple sequence alignments and hidden Markov models covering many common protein domains and families. Pfam is hosted at the Sanger Institute server in the United Kingdom. Interpro is hosted at the European Bioinformatics Institute in the United Kingdom.

### 1. ELM2-Related Polypeptides

[0638] The results of the InterPro scan (see Zdobnov E. M. and Apweiler R.; “InterProScan—an integration platform for the signature-recognition methods in InterPro.”; Bioinformatics, 2001, 17(9): 847-8 (InterPro database, version 4.7)) of the polypeptide sequence as represented by SEQ ID NO: 2 are presented in Table B1.

TABLE B1
InterPro scan results (major accession number IPR000949) of
the polypeptide sequence as represented by SEQ ID NO: 2.

| | Accession | | Amino acid coordinates |
|---|---|---|---|
| Database | number | Accession name | on SEQ ID NO: 2 |
| PROFILE | PS51156 | ELM2 | 223-267 |
| PFAM | PF01448 | ELM2 | 225-258 |

[0639] In an embodiment an ELM2-related polypeptide comprises a conserved domain or motif with at least 70%, 71%, 72%, 73%, 74%, 75%, 76%, 77%, 78%, 79%, 80%, 81%, 82%, 83%, 84%, 85%, 86%, 87%, 88%, 89%, 90%, 91%, 92%, 93%, 94%, 95%, 96%, 97%, 98%, or 99% sequence identity to a conserved domain from amino acid 225 to 258 in SEQ ID NO: 2, more preferably to a conserved domain from amino acid 225 to 262 in SEQ ID NO: 2.

### 2. WRKY-Related Polypeptides

[0640] The results of the InterPro scan (see Zdobnov E. M. and Apweiler R.; “InterProScan—an integration platform for the signature-recognition methods in InterPro.”; Bioinformatics, 2001, 17(9): 847-8 (InterPro database, release 31.0)) of the polypeptide sequence as represented by SEQ ID NO: 103 are presented in Table B2.

TABLE B2
InterPro scan results (major accession numbers) of the polypeptide
sequence as represented by SEQ ID NO: 103.

| Method | Accession | Domain | start | stop | E-value |
|---|---|---|---|---|---|
| Gene3D | G3DSA:2.20.25.80 | — | 240 | 315 | 1.70E−28 |
| PFAM | PF03106 | WRKY | 254 | 313 | 1.60E−27 |
| SMART | SM00774 | WRKY | 254 | 314 | 1.10E−35 |
| PROFILE | PS50811 | WRKY | 249 | 315 | 27.933 |
| SUPERFAMILY | SSF118290 | WRKY | 245 | 316 | 3.2E−27 |

[0641] In an embodiment a WRKY-related polypeptide comprises a conserved domain (or motif) with at least 70%, 71%, 72%, 73%, 74%, 75%, 76%, 77%, 78%, 79%, 80%, 81%, 82%, 83%, 84%, 85%, 86%, 87%, 88%, 89%, 90%, 91%, 92%, 93%, 94%, 95%, 96%, 97%, 98%, or 99% sequence identity to a conserved domain from amino acid 254 to 313 SEQ ID NO: 103).

### 3. EMG1-Like Polypeptides

[0642] The results of the InterPro scan (see Zdobnov E. M. and Apweiler R.; “InterProScan—an integration platform for the signature-recognition methods in InterPro.”; Bioinformatics, 2001, 17(9): 847-8 (InterPro database, release version 4.8)) of the polypeptide sequence as represented by SEQ ID NO: 179 are presented in Table B3.

TABLE B3
InterPro scan results (major accession number IPR005304) of
the polypeptide sequence as represented by SEQ ID NO: 179.

| | Accession | | Amino acid coordinates |
|---|---|---|---|
| Database | number | Accession name | on SEQ ID NO: 179 |
| PFAM | PF03587 | EMG1/NEP1 | 81-276 |

[0643] In an embodiment an EMG1-like polypeptide comprises a conserved domain with at least 60%, 61%, 62%, 63%, 64%, 65%, 66%, 67%, 68%, 69%, 70%, 71%, 72%, 73%, 74%, 75%, 76%, 77%, 78%, 79%, 80%, 81%, 82%, 83%, 84%, 85%, 86%, 87%, 88%, 89%, 90%, 91%, 92%, 93%, 94%, 95%, 96%, 97%, 98%, or 99% sequence identity to a conserved domain from amino acid 81 to 276 in SEQ ID NO: 179.

### 4. GPx-Related Polypeptides

[0644] The results of the InterPro scan (see Zdobnov E. M. and Apweiler R.; “InterProScan—an integration platform for the signature-recognition methods in InterPro.”; Bioinformatics, 2001, 17(9): 847-8 (InterPro database, release Ver 34.0)) of the polypeptide sequence as represented by SEQ ID NO: 293 are presented in Table B4.

TABLE B4

| Method | Accession | Domain | start | stop | E-value |
|---|---|---|---|---|---|
| PRINTS | IPR000889 | Glutathione | 98 | 115 | 8.40E−22 |
| | | peroxidase | | | |
| PRINTS | IPR000889 | Glutathione | 134 | 150 | 8.40E−22 |
| | | peroxidase | | | |
| PRINTS | IPR000889 | Glutathione | 199 | 208 | 8.40E−22 |
| | | peroxidase | | | |
| PIR | IPR000889 | Glutathione | 51 | 238 | 1.10E−84 |
| | | peroxidase | | | |
| PANTHER | IPR000889 | Glutathione | 40 | 237 | 1.20E−102 |
| | | peroxidase | | | |
| PFAM | IPR000889 | Glutathione | 80 | 188 | 8.30E−43 |
| | | peroxidase | | | |
| PROSITE | IPR000889 | Glutathione | 100 | 115 | 0.0 |
| | | peroxidase | | | |
| PROSITE | IPR000889 | Glutathione | 137 | 144 | 0.0 |
| | | peroxidase | | | |
| PROSITE | IPR000889 | Glutathione | 70 | 238 | 0.0 |
| | | peroxidase | | | |
| GENE3D | IPR012335 | Thioredoxin | 79 | 236 | 2.70E−77 |
| | | fold | | | |
| SUPERF | IPR012336 | Thioredoxin | 78 | 237 | 9.30E−64 |
| | | fold | | | |

[0645] In one embodiment a GPx-related polypeptide comprises a conserved domain (or motif) with at least 70%, 71%, 72%, 73%, 74%, 75%, 76%, 77%, 78%, 79%, 80%, 81%, 82%, 83%, 84%, 85%, 86%, 87%, 88%, 89%, 90%, 91%, 92%, 93%, 94%, 95%, 96%, 97%, 98%, or 99% sequence identity to a conserved domain from amino acid 80 to 188 in SEQ ID NO: 293).

### Example 5

### Topology Prediction of the Polypeptide Sequences Useful in Performing the Methods of Invention

[0646] TargetP 1.1 predicts the subcellular location of eukaryotic proteins. The location assignment is based on the predicted presence of any of the N-terminal pre-sequences: chloroplast transit peptide (cTP), mitochondrial targeting peptide (mTP) or secretory pathway signal peptide (SP). Scores on which the final prediction is based are not really probabilities, and they do not necessarily add to one. However, the location with the highest score is the most likely according to TargetP, and the relationship between the scores (the reliability class) may be an indication of how certain the prediction is. The reliability class (RC) ranges from 1 to 5, where 1 indicates the strongest prediction. For the sequences predicted to contain an N-terminal presequence a potential cleavage site can also be predicted. TargetP is maintained at the server of the Technical University of Denmark.

[0647] For the sequences predicted to contain an N-terminal presequence a potential cleavage site can also be predicted.

[0648] A number of parameters must be selected before analysing a sequence, such as organism group (non-plant or plant), cutoff sets (none, predefined set of cutoffs, or user-specified set of cutoffs), and the calculation of prediction of cleavage sites (yes or no).

[0649] Many other algorithms can be used to perform such analyses, including:
[0650] ChloroP 1.1 hosted on the server of the Technical University of Denmark;
[0651] Protein Prowler Subcellular Localisation Predictor version 1.2 hosted on the server of the Institute for Molecular Bioscience, University of Queensland, Brisbane, Australia;
[0652] PENCE Proteome Analyst PA-GOSUB 2.5 hosted on the server of the University of Alberta, Edmonton, Alberta, Canada;
[0653] TMHMM, hosted on the server of the Technical University of Denmark
[0654] PSORT (URL: psort.org)
[0655] PLOC (Park and Kanehisa, Bioinformatics, 19, 1656-1663, 2003).

### 1. WRKY-Related Polypeptides

[0656] The results of TargetP 1.1 analysis of the polypeptide sequence as represented by SEQ ID NO: 103 are presented Table C. The “plant” organism group has been selected, no cutoffs defined, and the predicted length of the transit peptide requested. The subcellular localization of the polypeptide sequence as represented by SEQ ID NO: 103 may be the cytoplasm or nucleus, no transit peptide is predicted.

TABLE C1
TargetP 1.1 analysis of the polypeptide sequence
as represented by SEQ ID NO: 103.

| | |
|---|---|
| Length (AA) | 631 |
| Chloroplastic transit peptide | 0.101 |
| Mitochondrial transit peptide | 0.119 |
| Secretory pathway signal peptide | 0.070 |
| Other subcellular targeting | 0.927 |
| Predicted Location | / |
| Reliability class | 1 |
| Predicted transit peptide length | / |

### 2. EMG1-Like Polypeptides

[0657] The results of TargetP 1.1 analysis of the polypeptide sequence as represented by SEQ ID NO: 179 are presented Table C2. The “plant” organism group has been selected, no cutoffs defined, and the predicted length of the transit peptide requested. The subcellular localization of the polypeptide sequence as represented by SEQ ID NO: 179 may be the cytoplasm or nucleus, no transit peptide is predicted.

TABLE C2
TargetP 1.1 analysis of the polypeptide sequence as
represented by SEQ ID NO: 179.

| | |
|---|---|
| Length (AA) | 284 |
| Chloroplastic transit peptide | 0.037 |
| Mitochondrial transit peptide | 0.329 |
| Secretory pathway signal peptide | 0.081 |
| Other subcellular targeting | 0.878 |
| Predicted Location | / |
| Reliability class | 3 |
| Predicted transit peptide length | / |

### Example 6

### Functional Assay Related to the Polypeptide Sequences Useful in Performing the Methods of the Invention

### 1. ELM2-Related Polypeptides

[0658] ELM2-related polypeptides, at least in their native form, typically have transcriptional repression activity, involved in inhibiting chromatin remodeling. Tools and techniques for measuring such activity are well known in the art and e.g. described in Ding et al., Mol. Cell Biol. 2003 January; 23(1): 250-8.

### Example 7

### Cloning of the Nucleic Acid Sequence Used in Methods of the Invention

### 1. ELM2-Related Polypeptides

[0659] In a first experiment, the nucleic acid sequence was amplified by PCR using as template a custom-made Poplar trichocarpa seedlings cDNA library. PCR was performed using a commercially available proofreading Taq DNA polymerase in standard conditions, using 200 ng of template in a 50 μl PCR mix. The primers used were prm11394 (SEQ ID NO: 98; sense): 5′-ggggacaagtttgtacaaaaaagcaggcttaaacaatgatggacggttctttttct-3′ and prm11395 (SEQ ID NO: 99; reverse, complementary): 5′-ggggaccactttgtacaagaaagctgggtgcatcaacctgatcag acact-3′, which include the AttB sites for Gateway recombination. The amplified PCR fragment was purified also using standard methods. The first step of the Gateway procedure, the BP reaction, was then performed, during which the PCR fragment recombined in vivo with the pDONR201 plasmid to produce, according to the Gateway terminology, an “entry clone”, pELM2-related. Plasmid pDONR201 was purchased from Invitrogen, as part of the Gateway® technology.

[0660] In a second experiment, the nucleic acid sequence was amplified by PCR using as template a custom-made Medicago truncatula seedlings cDNA library. PCR was performed using a commercially available proofreading Taq DNA polymerase in standard conditions, using 200 ng of template in a 50 μl PCR mix. The primers used were prm11280 (SEQ ID NO: 100; sense): 5′-ggggacaagtttgtacaaaaaagcaggcttaaacaatgttgggtagtgagcaaact-3′ and prm11281 (SEQ ID NO: 101; reverse, complementary): 5′ ggggaccactttgtacaagaaagctgggtta cagctcatgatttgaggc 3′, which include the AttB sites for Gateway recombination. The amplified PCR fragment was purified also using standard methods. The first step of the Gateway procedure, the BP reaction, was then performed, during which the PCR fragment recombined in vivo with the pDONR201 plasmid to produce, according to the Gateway terminology, an “entry clone”, pELM2-related. Plasmid pDONR201 was purchased from Invitrogen, as part of the Gateway® technology.

[0661] The entry clones comprising either SEQ ID NO: 1 or SEQ ID NO: 3 were then used in an LR reaction with a destination vector used for Oryza sativa transformation. This vector contained as functional elements within the T-DNA borders: a plant selectable marker; a screenable marker expression cassette; and a Gateway cassette intended for LR in vivo recombination with the nucleic acid sequence of interest already cloned in the entry clone. A rice GOS2 promoter (SEQ ID NO: 97) for constitutive expression was located upstream of this Gateway cassette.

[0662] After the LR recombination step, the resulting expression vectors pGOS2::ELM2-related (FIG. 7) were transformed into Agrobacterium strain LBA4044 according to methods well known in the art.

### 2. WRKY-Related Polypeptides

[0663] The nucleic acid sequence was amplified by PCR using as template a custom-made Arabidopsis thaliana seedlings cDNA library. PCR was performed using a commercially available proofreading Taq DNA polymerase in standard conditions, using 200 ng of template in a 50 μl PCR mix. The primers used were prm10976 (SEQ ID NO: 176; sense): 5′-ggggacaagtttgtacaaaaaagcaggcttaaacaatggagtgcagttctgggagatc-3′ and prm10977 (SEQ ID NO: 177; reverse, complementary): 5′-ggggaccactttgtacaagaaagctg ggttcaccaattaattggtgttgtcactatt-3′, which include the AttB sites for Gateway recombination. The amplified PCR fragment was purified also using standard methods. The first step of the Gateway procedure, the BP reaction, was then performed, during which the PCR fragment recombined in vivo with the pDONR201 plasmid to produce, according to the Gateway terminology, an “entry clone”, pWRKY. Plasmid pDONR201 was purchased from Invitrogen, as part of the Gateway® technology.

[0664] The entry clone comprising SEQ ID NO: 102 was then used in an LR reaction with a destination vector used for Oryza sativa transformation. This vector contained as functional elements within the T-DNA borders: a plant selectable marker; a screenable marker expression cassette; and a Gateway cassette intended for LR in vivo recombination with the nucleic acid sequence of interest already cloned in the entry clone. A rice GOS2 promoter (SEQ ID NO: 174) for constitutive expression was located upstream of this Gateway cassette.

[0665] After the LR recombination step, the resulting expression vector pGOS2::WRKY (FIG. 9) was transformed into Agrobacterium strain LBA4044 according to methods well known in the art.

### 3. EMG1-Like Polypeptides

[0666] The nucleic acid sequence was amplified by PCR using as template a custom-made Populus trichocarpa seedlings cDNA library. PCR was performed using a commercially available proofreading Taq DNA polymerase in standard conditions, using 200 ng of template in a 50 μl PCR mix. The primers used were prm14800 (SEQ ID NO: 290; sense): 5′-ggggacaagtttgtacaaaaaagcaggcttaaacaatggtgaggccttatggtaaa-3′ and prm14801 (SEQ ID NO: 291; reverse, complementary): 5′-ggggaccactttgtacaagaaagctgggttgatcgacaaaatgcaga gac-3′, which include the AttB sites for Gateway recombination. The amplified PCR fragment was purified also using standard methods. The first step of the Gateway procedure, the BP reaction, was then performed, during which the PCR fragment recombined in vivo with the pDONR201 plasmid to produce, according to the Gateway terminology, an “entry clone”, pEMG1. Plasmid pDONR201 was purchased from Invitrogen, as part of the Gateway® technology.

[0667] The entry clone comprising SEQ ID NO: 178 was then used in an LR reaction with a destination vector used for Oryza sativa transformation. This vector contained as functional elements within the T-DNA borders: a plant selectable marker; a screenable marker expression cassette; and a Gateway cassette intended for LR in vivo recombination with the nucleic acid sequence of interest already cloned in the entry clone. A rice GOS2 promoter (SEQ ID NO: 289) for constitutive expression was located upstream of this Gateway cassette.

[0668] After the LR recombination step, the resulting expression vector pGOS2::EMG1-like (FIG. 16) was transformed into Agrobacterium strain LBA4044 according to methods well known in the art.

### 4. GPx-Related Polypeptides

[0669] The nucleic acid sequence for SEQ ID NO: 292 was amplified by PCR using as template a custom-made Oryza sativa seedlings cDNA library. The nucleic acid sequence for SEQ ID NO: 294 and 296, respectively, was amplified by PCR using as template a custom-made Populus trichocarpa seedlings cDNA library. PCR was performed using a commercially available proofreading Taq DNA polymerase in standard conditions, using 200 ng of template in a 50 μl PCR mix. The primers used for amplification of:
[0670] SEQ ID NO: 292 were prm15927: (SEQ ID NO: 381; sense): 5′-ggggacaagtttgtacaaaaaagcaggcttaaacaatgccgtctcgcacc-3′ and prm15928 (SEQ ID NO: 382; reverse, complementary): 5′-ggggaccactttgtacaagaaagctggg tcggcggtaaggttttaag-3′;
[0671] SEQ ID NO: 294 were prm15929 (SEQ ID NO: 383; sense): 5′-ggggacaagtttgtacaaaaaagcaggcttaaacaatggctagccaatccagtg-3′ and prm15930 (SEQ ID NO: 384; reverse, complementary): 5′-ggggaccactttgtacaag aaagctgggtaattaaacaaccatgccttga-3′;
[0672] SEQ ID NO: 296 were prm15925 (SEQ ID NO: 385; sense): 5′-ggggacaagtttgtacaaaaaagcaggcttaaacaatggcttccttacctttctcc-3′ and prm15926 (SEQ ID NO: 386; reverse, complementary): 5′-ggggaccactttgtacaagaaagctgggt ctcatacatgtcactgctgcc-3′;
   which include the AttB sites for Gateway recombination. The amplified PCR fragment was purified also using standard methods. The first step of the Gateway procedure, the BP reaction, was then performed, during which the PCR fragment recombined in vivo with the pDONR201 plasmid to produce, according to the Gateway terminology, an “entry clone”, pGPx-related. Plasmid pDONR201 was purchased from Invitrogen, as part of the Gateway® technology.

[0673] The entry clone comprising SEQ ID NO: 292, 294, and 296, respectively, was then used in an LR reaction with a destination vector used for Oryza sativa transformation. This vector contained as functional elements within the T-DNA borders: a plant selectable marker; a screenable marker expression cassette; and a Gateway cassette intended for LR in vivo recombination with the nucleic acid sequence of interest already cloned in the entry clone. A rice GOS2 promoter (SEQ ID NO: 379) for constitutive expression was located upstream of this Gateway cassette.

[0674] After the LR recombination step, the resulting expression vector pGOS2::GPx-related gene (FIG. 18) was transformed into Agrobacterium strain LBA4044 according to methods well known in the art.

### Example 8

### Plant Transformation

### Rice Transformation

[0675] The Agrobacterium containing the expression vector was used to transform Oryza sativa plants. Mature dry seeds of the rice japonica cultivar Nipponbare were dehusked. Sterilization was carried out by incubating for one minute in 70% ethanol, followed by 30 to 60 minutes, preferably 30 minutes in sodium hypochlorite solution (depending on the grade of contamination), followed by a 3 to 6 times, preferably 4 time wash with sterile distilled water. The sterile seeds were then germinated on a medium containing 2,4-D (callus induction medium). After incubation in light for 6 days scutellum-derived calli is transformed with Agrobacterium as described herein below.

[0676] Agrobacterium strain LBA4404 containing the expression vector was used for co-cultivation. Agrobacterium was inoculated on AB medium with the appropriate antibiotics and cultured for 3 days at 28° C. The bacteria were then collected and suspended in liquid co-cultivation medium to a density (OD600) of about 1. The calli were immersed in the suspension for 1 to 15 minutes. The callus tissues were then blotted dry on a filter paper and transferred to solidified, co-cultivation medium and incubated for 3 days in the dark at 25° C. After washing away the Agrobacterium, the calli were grown on 2,4-D-containing medium for 10 to 14 days (growth time for indica: 3 weeks) under light at 28° C.-32° C. in the presence of a selection agent. During this period, rapidly growing resistant callus developed. After transfer of this material to regeneration media, the embryogenic potential was released and shoots developed in the next four to six weeks. Shoots were excised from the calli and incubated for 2 to 3 weeks on an auxin-containing medium from which they were transferred to soil. Hardened shoots were grown under high humidity and short days in a greenhouse.

[0677] Transformation of rice cultivar indica can also be done in a similar way as give above according to techniques well known to a skilled person.

[0678] 35 to 90 independent T0 rice transformants were generated for one construct. The primary transformants were transferred from a tissue culture chamber to a greenhouse. After a quantitative PCR analysis to verify copy number of the T-DNA insert, only single copy transgenic plants that exhibit tolerance to the selection agent were kept for harvest of T1 seed. Seeds were then harvested three to five months after transplanting. The method yielded single locus transformants at a rate of over 50% (Aldemita and Hodges1996, Chan et al. 1993, Hiei et al. 1994).

### Example 9

### Transformation of Other Crops

### Corn Transformation

[0679] Transformation of maize (Zea mays) is performed with a modification of the method described by Ishida et al. (1996) Nature Biotech 14(6): 745-50. Transformation is genotype-dependent in corn and only specific genotypes are amenable to transformation and regeneration. The inbred line A188 (University of Minnesota) or hybrids with A188 as a parent are good sources of donor material for transformation, but other genotypes can be used successfully as well. Ears are harvested from corn plant approximately 11 days after pollination (DAP) when the length of the immature embryo is about 1 to 1.2 mm. Immature embryos are cocultivated with Agrobacterium tumefaciens containing the expression vector, and transgenic plants are recovered through organogenesis. Excised embryos are grown on callus induction medium, then maize regeneration medium, containing the selection agent (for example imidazolinone but various selection markers can be used). The Petri plates are incubated in the light at 25° C. for 2-3 weeks, or until shoots develop. The green shoots are transferred from each embryo to maize rooting medium and incubated at 25° C. for 2-3 weeks, until roots develop. The rooted shoots are transplanted to soil in the greenhouse. T1 seeds are produced from plants that exhibit tolerance to the selection agent and that contain a single copy of the T-DNA insert.

### Wheat Transformation

[0680] Transformation of wheat is performed with the method described by Ishida et al. (1996) Nature Biotech 14(6): 745-50. The cultivar Bobwhite (available from CIMMYT, Mexico) is commonly used in transformation. Immature embryos are co-cultivated with Agrobacterium tumefaciens containing the expression vector, and transgenic plants are recovered through organogenesis. After incubation with Agrobacterium, the embryos are grown in vitro on callus induction medium, then regeneration medium, containing the selection agent (for example imidazolinone but various selection markers can be used). The Petri plates are incubated in the light at 25° C. for 2-3 weeks, or until shoots develop. The green shoots are transferred from each embryo to rooting medium and incubated at 25° C. for 2-3 weeks, until roots develop. The rooted shoots are transplanted to soil in the greenhouse. T1 seeds are produced from plants that exhibit tolerance to the selection agent and that contain a single copy of the T-DNA insert.

### Soybean Transformation

[0681] Soybean is transformed according to a modification of the method described in the Texas A&M patent U.S. Pat. No. 5,164,310. Several commercial soybean varieties are amenable to transformation by this method. The cultivar Jack (available from the Illinois Seed foundation) is commonly used for transformation. Soybean seeds are sterilised for in vitro sowing. The hypocotyl, the radicle and one cotyledon are excised from seven-day old young seedlings. The epicotyl and the remaining cotyledon are further grown to develop axillary nodes. These axillary nodes are excised and incubated with Agrobacterium tumefaciens containing the expression vector. After the cocultivation treatment, the explants are washed and transferred to selection media. Regenerated shoots are excised and placed on a shoot elongation medium. Shoots no longer than 1 cm are placed on rooting medium until roots develop. The rooted shoots are transplanted to soil in the greenhouse. T1 seeds are produced from plants that exhibit tolerance to the selection agent and that contain a single copy of the T-DNA insert.

### Rapeseed/Canola Transformation

[0682] Cotyledonary petioles and hypocotyls of 5-6 day old young seedling are used as explants for tissue culture and transformed according to Babic et al. (1998, Plant Cell Rep 17: 183-188). The commercial cultivar Westar (Agriculture Canada) is the standard variety used for transformation, but other varieties can also be used. Canola seeds are surface-sterilized for in vitro sowing. The cotyledon petiole explants with the cotyledon attached are excised from the in vitro seedlings, and inoculated with Agrobacterium (containing the expression vector) by dipping the cut end of the petiole explant into the bacterial suspension. The explants are then cultured for 2 days on MSBAP-3 medium containing 3 mg/l BAP, 3% sucrose, 0.7 Phytagar at 23° C., 16 hr light. After two days of co-cultivation with Agrobacterium, the petiole explants are transferred to MSBAP-3 medium containing 3 mg/l BAP, cefotaxime, carbenicillin, or timentin (300 mg/l) for 7 days, and then cultured on MSBAP-3 medium with cefotaxime, carbenicillin, or timentin and selection agent until shoot regeneration. When the shoots are 5-10 mm in length, they are cut and transferred to shoot elongation medium (MSBAP-0.5, containing 0.5 mg/l BAP). Shoots of about 2 cm in length are transferred to the rooting medium (MS0) for root induction. The rooted shoots are transplanted to soil in the greenhouse. T1 seeds are produced from plants that exhibit tolerance to the selection agent and that contain a single copy of the T-DNA insert.

### Alfalfa Transformation

[0683] A regenerating clone of alfalfa (Medicago sativa) is transformed using the method of (McKersie et al., 1999 Plant Physiol 119: 839-847). Regeneration and transformation of alfalfa is genotype dependent and therefore a regenerating plant is required. Methods to obtain regenerating plants have been described. For example, these can be selected from the cultivar Rangelander (Agriculture Canada) or any other commercial alfalfa variety as described by Brown DCW and A Atanassov (1985. Plant Cell Tissue Organ Culture 4: 111-112). Alternatively, the RA3 variety (University of Wisconsin) has been selected for use in tissue culture (Walker et al., 1978 Am J Bot 65:654-659). Petiole explants are cocultivated with an overnight culture of Agrobacterium tumefaciens C58C1 pMP90 (McKersie et al., 1999 Plant Physiol 119: 839-847) or LBA4404 containing the expression vector. The explants are cocultivated for 3 d in the dark on SH induction medium containing 288 mg/L Pro, 53 mg/L thioproline, 4.35 g/L K2SO4, and 100 μm acetosyringinone. The explants are washed in half-strength Murashige-Skoog medium (Murashige and Skoog, 1962) and plated on the same SH induction medium without acetosyringinone but with a suitable selection agent and suitable antibiotic to inhibit Agrobacterium growth. After several weeks, somatic embryos are transferred to BOi2Y development medium containing no growth regulators, no antibiotics, and 50 g/L sucrose. Somatic embryos are subsequently germinated on half-strength Murashige-Skoog medium. Rooted seedlings were transplanted into pots and grown in a greenhouse. T1 seeds are produced from plants that exhibit tolerance to the selection agent and that contain a single copy of the T-DNA insert.

### Cotton Transformation

[0684] Cotton is transformed using Agrobacterium tumefaciens according to the method described in U.S. Pat. No. 5,159,135. Cotton seeds are surface sterilised in 3% sodium hypochlorite solution during 20 minutes and washed in distilled water with 500 μg/ml cefotaxime. The seeds are then transferred to SH-medium with 50 μg/ml benomyl for germination. Hypocotyls of 4 to 6 days old seedlings are removed, cut into 0.5 cm pieces and are placed on 0.8% agar. An Agrobacterium suspension (approx. 108 cells per ml, diluted from an overnight culture transformed with the gene of interest and suitable selection markers) is used for inoculation of the hypocotyl explants. After 3 days at room temperature and lighting, the tissues are transferred to a solid medium (1.6 g/l Gelrite) with Murashige and Skoog salts with B5 vitamins (Gamborg et al., Exp. Cell Res. 50:151-158 (1968)), 0.1 mg/l 2,4-D, 0.1 mg/l 6-furfurylaminopurine and 750 μg/ml MgCL2, and with 50 to 100 μg/ml cefotaxime and 400-500 μg/ml carbenicillin to kill residual bacteria. Individual cell lines are isolated after two to three months (with subcultures every four to six weeks) and are further cultivated on selective medium for tissue amplification (30° C., 16 hr photoperiod). Transformed tissues are subsequently further cultivated on non-selective medium during 2 to 3 months to give rise to somatic embryos. Healthy looking embryos of at least 4 mm length are transferred to tubes with SH medium in fine vermiculite, supplemented with 0.1 mg/l indole acetic acid, 6 furfurylaminopurine and gibberellic acid. The embryos are cultivated at 30° C. with a photoperiod of 16 hrs, and plantlets at the 2 to 3 leaf stage are transferred to pots with vermiculite and nutrients. The plants are hardened and subsequently moved to the greenhouse for further cultivation.

### Sugarbeet Transformation

[0685] Seeds of sugarbeet (Beta vulgaris L.) are sterilized in 70% ethanol for one minute followed by 20 min. shaking in 20% Hypochlorite bleach e.g. Clorox® regular bleach (commercially available from Clorox, 1221 Broadway, Oakland, Calif. 94612, USA). Seeds are rinsed with sterile water and air dried followed by plating onto germinating medium (Murashige and Skoog (MS) based medium (Murashige, T., and Skoog, 1962. Physiol. Plant, vol. 15, 473-497) including B5 vitamins (Gamborg et al.; Exp. Cell Res., vol. 50, 151-8.) supplemented with 10 g/l sucrose and 0.8% agar). Hypocotyl tissue is used essentially for the initiation of shoot cultures according to Hussey and Hepher (Hussey, G., and Hepher, A., 1978. Annals of Botany, 42, 477-9) and are maintained on MS based medium supplemented with 30 g/l sucrose plus 0.25 mg/l benzylamino purine and 0.75% agar, pH 5.8 at 23-25° C. with a 16-hour photoperiod. Agrobacterium tumefaciens strain carrying a binary plasmid harbouring a selectable marker gene, for example nptII, is used in transformation experiments. One day before transformation, a liquid LB culture including antibiotics is grown on a shaker (28° C., 150 rpm) until an optical density (O.D.) at 600 nm of ˜1 is reached. Overnight-grown bacterial cultures are centrifuged and resuspended in inoculation medium (O.D. ˜1) including Acetosyringone, pH 5.5. Shoot base tissue is cut into slices (1.0 cm×1.0 cm×2.0 mm approximately). Tissue is immersed for 30 s in liquid bacterial inoculation medium. Excess liquid is removed by filter paper blotting. Co-cultivation occurred for 24-72 hours on MS based medium incl. 30 g/l sucrose followed by a non-selective period including MS based medium, 30 g/l sucrose with 1 mg/l BAP to induce shoot development and cefotaxim for eliminating the Agrobacterium. After 3-10 days explants are transferred to similar selective medium harbouring for example kanamycin or G418 (50-100 mg/l genotype dependent). Tissues are transferred to fresh medium every 2-3 weeks to maintain selection pressure. The very rapid initiation of shoots (after 3-4 days) indicates regeneration of existing meristems rather than organogenesis of newly developed transgenic meristems. Small shoots are transferred after several rounds of subculture to root induction medium containing 5 mg/l NAA and kanamycin or G418. Additional steps are taken to reduce the potential of generating transformed plants that are chimeric (partially transgenic). Tissue samples from regenerated shoots are used for DNA analysis. Other transformation methods for sugarbeet are known in the art, for example those by Linsey & Gallois (Linsey, K., and Gallois, P., 1990. Journal of Experimental Botany; vol. 41, No. 226; 529-36) or the methods published in the international application published as WO 96/23891A.

### Sugarcane Transformation

[0686] Spindles are isolated from 6-month-old field grown sugarcane plants (Arencibia et al., 1998. Transgenic Research, vol. 7, 213-22; Enriquez-Obregon et al., 1998. Planta, vol. 206, 20-27). Material is sterilized by immersion in a 20% Hypochlorite bleach e.g. Clorox® regular bleach (commercially available from Clorox, 1221 Broadway, Oakland, Calif. 94612, USA) for 20 minutes. Transverse sections around 0.5 cm are placed on the medium in the top-up direction. Plant material is cultivated for 4 weeks on MS (Murashige, T., and Skoog, 1962. Physiol. Plant, vol. 15, 473-497) based medium incl. B5 vitamins (Gamborg, O., et al., 1968. Exp. Cell Res., vol. 50, 151-8) supplemented with 20 g/l sucrose, 500 mg/l casein hydrolysate, 0.8% agar and 5 mg/l 2,4-D at 23° C. in the dark. Cultures are transferred after 4 weeks onto identical fresh medium. Agrobacterium tumefaciens strain carrying a binary plasmid harbouring a selectable marker gene, for example hpt, is used in transformation experiments. One day before transformation, a liquid LB culture including antibiotics is grown on a shaker (28° C., 150 rpm) until an optical density (O.D.) at 600 nm of ˜0.6 is reached. Overnight-grown bacterial cultures are centrifuged and resuspended in MS based inoculation medium (O.D. ˜0.4) including acetosyringone, pH 5.5. Sugarcane embryogenic callus pieces (2-4 mm) are isolated based on morphological characteristics as compact structure and yellow colour and dried for 20 min. in the flow hood followed by immersion in a liquid bacterial inoculation medium for 10-20 minutes. Excess liquid is removed by filter paper blotting. Co-cultivation occurred for 3-5 days in the dark on filter paper which is placed on top of MS based medium incl. B5 vitamins containing 1 mg/l 2,4-D. After co-cultivation calli are washed with sterile water followed by a non-selective cultivation period on similar medium containing 500 mg/l cefotaxime for eliminating remaining Agrobacterium cells. After 3-10 days explants are transferred to MS based selective medium incl. B5 vitamins containing 1 mg/l 2,4-D for another 3 weeks harbouring 25 mg/l of hygromycin (genotype dependent). All treatments are made at 23° C. under dark conditions. Resistant calli are further cultivated on medium lacking 2,4-D including 1 mg/l BA and 25 mg/l hygromycin under 16 h light photoperiod resulting in the development of shoot structures. Shoots are isolated and cultivated on selective rooting medium (MS based including, 20 g/l sucrose, 20 mg/l hygromycin and 500 mg/l cefotaxime). Tissue samples from regenerated shoots are used for DNA analysis. Other transformation methods for sugarcane are known in the art, for example from the in-ternational application published as WO 2010/151634A and the granted European patent EP 1831378.

### Example 10

### Phenotypic Evaluation Procedure

### 10.1 Evaluation Setup

[0687] 35 to 90 independent T0 rice transformants were generated. The primary transformants were transferred from a tissue culture chamber to a greenhouse for growing and harvest of T1 seed. Six events, of which the T1 progeny segregated 3:1 for presence/absence of the transgene, were retained. For each of these events, approximately 10 T1 seedlings containing the transgene (hetero- and homo-zygotes) and approximately 10 T1 seedlings lacking the transgene (nullizygotes) were selected by monitoring visual marker expression. The transgenic plants and the corresponding nullizygotes were grown side-by-side at random positions. Greenhouse conditions were of shorts days (12 hours light), 28° C. in the light and 22° C. in the dark, and a relative humidity of 70%. Plants grown under non-stress conditions were watered at regular intervals to ensure that water and nutrients were not limiting and to satisfy plant needs to complete growth and development, unless they were used in a stress screen.

[0688] From the stage of sowing until the stage of maturity the plants were passed several times through a digital imaging cabinet. At each time point digital images (2048×1536 pixels, 16 million colours) were taken of each plant from at least 6 different angles.

[0689] T1 events can be further evaluated in the T2 generation following the same evaluation procedure as for the T1 generation, e.g. with less events and/or with more individuals per event.

### Drought Screen

[0690] T1 or T2 plants are grown in potting soil under normal conditions until they approached the heading stage. They are then transferred to a “dry” section where irrigation is withheld. Soil moisture probes are inserted in randomly chosen pots to monitor the soil water content (SWC). When SWC goes below certain thresholds, the plants are automatically re-watered continuously until a normal level is reached again. The plants are then re-transferred again to normal conditions. The rest of the cultivation (plant maturation, seed harvest) is the same as for plants not grown under abiotic stress conditions. Growth and yield parameters are recorded as detailed for growth under normal conditions.

### Nitrogen Use Efficiency Screen

[0691] T1 or T2 plants are grown in potting soil under normal conditions except for the nutrient solution. The pots are watered from transplantation to maturation with a specific nutrient solution containing reduced N nitrogen (N) content, usually between 7 to 8 times less. The rest of the cultivation (plant maturation, seed harvest) is the same as for plants not grown under abiotic stress. Growth and yield parameters are recorded as detailed for growth under normal conditions.

### Salt Stress Screen

[0692] T1 or T2 plants are grown on a substrate made of coco fibers and particles of baked clay (Argex) (3 to 1 ratio). A normal nutrient solution is used during the first two weeks after transplanting the plantlets in the greenhouse. After the first two weeks, 25 mM of salt (NaCl) is added to the nutrient solution, until the plants are harvested. Growth and yield parameters are recorded as detailed for growth under normal conditions.

### 10.2 Statistical Analysis: F Test

[0693] A two factor ANOVA (analysis of variants) was used as a statistical model for the overall evaluation of plant phenotypic characteristics. An F test was carried out on all the parameters measured of all the plants of all the events transformed with the gene of the present invention. The F test was carried out to check for an effect of the gene over all the transformation events and to verify for an overall effect of the gene, also known as a global gene effect. The threshold for significance for a true global gene effect was set at a 5% probability level for the F test. A significant F test value points to a gene effect, meaning that it is not only the mere presence or position of the gene that is causing the differences in phenotype.

### 10.3 Parameters Measured

[0694] From the stage of sowing until the stage of maturity the plants were passed several times through a digital imaging cabinet. At each time point digital images (2048×1536 pixels, 16 million colours) were taken of each plant from at least 6 different angles as described in WO 2010/031780. These measurements were used to determine different parameters.

### Biomass-Related Parameter Measurement

[0695] The plant aboveground area (or leafy biomass) was determined by counting the total number of pixels on the digital images from aboveground plant parts discriminated from the background. This value was averaged for the pictures taken on the same time point from the different angles and was converted to a physical surface value expressed in square mm by calibration. Experiments show that the aboveground plant area measured this way correlates with the biomass of plant parts above ground. The above ground area is the area measured at the time point at which the plant had reached its maximal leafy biomass.

[0696] Increase in root biomass is expressed as an increase in total root biomass (measured as maximum biomass of roots observed during the lifespan of a plant); or as an increase in the root/shoot index, measured as the ratio between root mass and shoot mass in the period of active growth of root and shoot. In other words, the root/shoot index is defined as the ratio of the rapidity of root growth to the rapidity of shoot growth in the period of active growth of root and shoot. Root biomass can be determined using a method as described in WO 2006/029987.

[0697] A robust indication of the height of the plant is the measurement of the location of the centre of gravity, i.e. determining the height (in mm) of the gravity centre of the leafy biomass. This avoids influence by a single erect leaf, based on the asymptote of curve fitting or, if the fit is not satisfactory, based on the absolute maximum.

### Parameters Related to Development Time

[0698] The early vigour is the plant aboveground area three weeks post-germination. Early vigour was determined by counting the total number of pixels from aboveground plant parts discriminated from the background. This value was averaged for the pictures taken on the same time point from different angles and was converted to a physical surface value expressed in square mm by calibration.

[0699] AreaEmer is an indication of quick early development when this value is decreased compared to control plants. It is the ratio (expressed in %) between the time a plant needs to make 30% of the final biomass and the time needs to make 90% of its final biomass.

[0700] The “time to flower” or “flowering time” of the plant can be determined using the method as described in WO 2007/093444.

### Seed-Related Parameter Measurements

[0701] The mature primary panicles were harvested, counted, bagged, barcode-labelled and then dried for three days in an oven at 37° C. The panicles were then threshed and all the seeds were collected and counted. The seeds are usually covered by a dry outer covering, the husk. The filled husks (herein also named filled florets) were separated from the empty ones using an air-blowing device. The empty husks were discarded and the remaining fraction was counted again. The filled husks were weighed on an analytical balance.

[0702] The total number of seeds was determined by counting the number of filled husks that remained after the separation step. The total seed weight was measured by weighing all filled husks harvested from a plant.

[0703] The total number of seeds (or florets) per plant was determined by counting the number of husks (whether filled or not) harvested from a plant.

[0704] Thousand Kernel Weight (TKW) is extrapolated from the number of seeds counted and their total weight.

[0705] The Harvest Index (HI) in the present invention is defined as the ratio between the total seed weight and the above ground area (mm²), multiplied by a factor 10⁶.

[0706] The number of flowers per panicle as defined in the present invention is the ratio between the total number of seeds over the number of mature primary panicles.

[0707] The “seed fill rate” or “seed filling rate” as defined in the present invention is the proportion (expressed as a %) of the number of filled seeds (i.e. florets containing seeds) over the total number of seeds (i.e. total number of florets). In other words, the seed filling rate is the percentage of florets that are filled with seed.

### Example 10

### Results of the Phenotypic Evaluation of the Transgenic Plants

### 1. ELM2-Related Polypeptides

[0708] The results of the evaluation of transgenic rice plants in the T2 generation and expressing a nucleic acid encoding the ELM2-related polypeptide of SEQ ID NO: 2 under non-stress conditions are presented below in Table D1. When grown under non-stress conditions, an increase of at least 5% was observed for seed yield, including total weight of seeds (totalwgseeds), number of seeds (nrfilledseed), fill rate and harvest index. In addition, 2 lines of plants expressing the ELM2-related nucleic acid of SEQ ID NO: 1 showed an increased root/shoot index and 3 lines showed an increase in Thousand Kernel Weight (TKW).

TABLE D1
Data summary for transgenic rice plants; for each parameter,
the overall percent increase is shown for T2 generation plants,
for each parameter the p-value is <0.05.

| Parameter | Overall increase |
|---|---|
| totalwgseeds | 25.1 |
| fillrate | 22.9 |
| harvestindex | 23.1 |
| nrfilledseed | 21.6 |

[0709] The results of the evaluation of transgenic rice plants in the T2 generation and expressing a nucleic acid encoding the ELM2-related polypeptide of SEQ ID NO: 2 under nitrogen deficiency stress conditions are presented below in Table D2. When grown under nitrogen deficiency stress conditions, an increase of at least 5% was observed for plant aboveground area or leafy biomass (AreaMax) and for seed yield, including total weight of seeds (totalwgseeds), number of florets (nrtotalseed), fill rate and number of seeds (nrfilledseed) In addition, 1 line of plants expressing the ELM2-related nucleic acid of SEQ ID NO: 1 under nitrogen deficient stress conditions showed an increased total root biomass and 3 lines showed an increase in the average amount of florets per panicle on a plant.

TABLE D2
Data summary for transgenic rice plants; for each parameter,
the overall percent increase is shown for T2 generation plants,
for each parameter the p-value is <0.05.

| Parameter | Overall increase |
|---|---|
| AreaMax | 9.6 |
| totalwgseeds | 16.7 |
| nrtotalseed | 7.5 |
| fillrate | 9.4 |
| nrfilledseed | 17.7 |

[0710] The results of the evaluation of transgenic rice plants in the T2 generation and expressing a nucleic acid encoding the ELM2-related polypeptide of SEQ ID NO: 4 under non-stress conditions are presented below in Table D3. When grown under non-stress conditions, an increase of at least 5% was observed for seed yield, including total weight of seeds (totalwgseeds), number of seeds (nrfilledseed), fill rate and harvest index. In addition, 1 line of plants expressing an ELM2-related nucleic acid of SEQ ID NO: 3 showed an increased total number of seeds.

TABLE D3
Data summary for transgenic rice plants; for each parameter,
the overall percent increase is shown for T2 generation plants,
for each parameter the p-value is <0.05.

| Parameter | Overall increase |
|---|---|
| totalwgseeds | 70.6 |
| fillrate | 55.4 |
| harvestindex | 60.5 |
| nrfilledseed | 67.0 |

### 2. WRKY-Related Polypeptides

[0711] The results of the evaluation of transgenic rice plants expressing a WRKY-related polypeptidenucleic acid under non-stress conditions are presented hereunder. An increase was observed for emergence vigour (early vigour), total seed yield (Totalwgseeds), fillrate, TKW, number of filled seeds, taller more erect plants (HeightMax), amount of thick roots (RootThickMax) (Table D4).

[0712] In addition, one or more lines showed increased number of florets per panicle on a plant (flowerperpan), increased harvestindex (HI), increased greenness of a plant before flowering (GNbfFlow), increased height of the plant (GravityYMax), increased quick early development (AreaEmer), increased Cycle Time (AreaCycl).

TABLE D4
Data summary for transgenic rice plants; for each parameter,
the overall percent increase is shown for the confirmation (T1
generation), for each parameter the p-value is <0.05.

| Parameter | Overall increase |
|---|---|
| EmerVigor | 13.1 |
| totalwgseeds | 16.3 |
| nrfilledseed | 12.2 |
| fillrate | 8.4 |
| TKW | 3.9 |
| HeightMax | 5.1 |
| RootThickMax | 7.1 |

### 3. EMG1-Like Polypeptides

[0713] The results of the evaluation of transgenic rice plants in the T1 generation and expressing a nucleic acid encoding the EMG1-like polypeptide of SEQ ID NO: 179 under non-stress conditions are presented below in Table D5. When grown under non-stress conditions, increase of at least 5% was observed for total seed yield (Totalwgseeds), seed fill rate (fillrate), harvest index (harvestindex). In addition 3 lines showed a positive trend for thousand kernel weight. See previous Examples for details on the generations of the transgenic plants.

TABLE D5
Data summary for transgenic rice plants; for each parameter,
the overall percent increase is shown for T1 generation plants,
for each parameter the p-value is <0.05.

| Parameter | Overall increase |
|---|---|
| totalwgseeds | 13.3 |
| fillrate | 14.5 |
| harvestindex | 15.5 |

### 4. GPx-Related Polypeptides

[0714] 10.1 The results of the evaluation of transgenic rice plants in the T2 generation and expressing a nucleic acid encoding the GPx-related polypeptide of SEQ ID NO: 293 under non-stress conditions are presented below in Table D6. When grown under non-stress conditions, an increase of at least 5% was observed for seed yield, particularly total weight of seeds, number of seeds, fill rate, harvest index. In addition, plants expressing a GPx-related nucleic acid of SEQ ID NO: 292 showed more number of flowers per panicle (Flowerperpan), increased Thousand Kernel Weight (TKW), increased height of the plant (HeightMax), increased robust indication of the height of the plant (GravityYMax).

TABLE D6
Data summary for transgenic rice plants; for each parameter,
the overall percent increase is shown for the confirmation (T1
generation), for each parameter the p-value is <0.05.

| Parameter | Overall increase |
|---|---|
| totalwgseeds | 26.6 |
| nrfilledseed | 23.2 |
| Fillrate | 21.4 |
| harvestindex | 25.8 |

[0715] 10.2 The results of the evaluation of transgenic rice plants in the T2 generation and expressing a nucleic acid encoding the GPx-related polypeptide of SEQ ID NO: 295 under non-stress conditions are presented below in Table D7. When grown under non-stress conditions, an increase of at least 5% was observed for more number of flowers per panicle (Flowerperpan), increased height of the plant (HeightMax), increased robust indication of the height of the plant (GravityYMax), quick early development (AreaEmer), seed yield, particularly total weight of seeds, number of seeds, fill rate, harvest index. In addition, plants expressing a GPx-related nucleic acid of SEQ ID NO: 294 showed a faster growth rate (an earlier start of flowering (TimetoFlower: time (in days) between sowing and the emergence of the first panicle), increased greenness of a plant before flowering (GNbfFlow), a faster growth rate (a shorter time (in days) needed between sowing and the day the plant reaches 90% of its final biomass (AreaCycl).

TABLE D7
Data summary for transgenic rice plants; for each parameter,
the overall percent increase is shown for T1 generation plants,
for each parameter the p-value is <0.05.

| Parameter | Overall increase |
|---|---|
| totalwgseeds | 30.3 |
| nrfilledseed | 25.7 |
| fillrate | 36.9 |
| harvestindex | 31.0 |
| flowerperpan | 10.7 |
| HeightMax | 5.8 |
| GravityYMax | 6.1 |
| AreaEmer | 5.6 |

[0716] 10.3 The results of the evaluation of transgenic rice plants in the T2 generation and expressing a nucleic acid encoding the GPx-related polypeptide of SEQ ID NO: 297 under non-stress conditions are presented in the following. When grown under non-stress conditions, an increase of at least 5% was observed for increased Thousand Kernel Weight (TKW), increased height of the plant (HeightMax), increased robust indication of the height of the plant (GravityYMax), a faster growth rate (a shorter time (in days) needed between sowing and the day the plant reaches 90% of its final biomass (AreaCycl).

The application's sequence listing, which the Patent Office published only in electronic form, follows.

SEQUENCE LISTING (386 sequences)

SEQ ID NO: 1 - DNA, 1281 bp, Populus trichocarpa
atgatggacggttctttttctaacgaggatgtaaaaggcaaggatgttgatgaaaatttgatatctgattcaaggaaaagtgagaaagtggaaaatgaggatgaggtgaagagcgtggtggtcgtggaaactgatggagatgaggaaggaaataagggtgataacagtgagattgaggaactggatttagcaacttttgaggaatctgtttctagtcgtaagaggaaacgggattccatttatagaatgctgaactgggttactgagattgcaaaagatccatgtgatcccgtggttggatcgttacctgagtggtcaaagtggaaaagttacgggaatgaagaatgctggaagcaggttttggtgacccgggaatcgttgtttctgaaaagaaatgctgattcaacttcaagtgcagaggggtttgttaagcagaaatatcagaagatgcatccatgtatgtacgatgaccatgctggatctagttacaatcttagagagaggttaaaatgtagaaagctttttcctggggaaacatcgtctcaagcacttgtttgctcacagtcatcttctgcagccacccaaactgattcagattcttgcatggaaggggtttatgatggtgattcttcaactgaatgttcagtgcttgacctgccaattacaaagagaattcctgtggggccagtttttcaggctgaagtaccagaatggactggcatggcttctgaaagtgactcaaagtggcttgggactcgggtttggccacttgaaacttcaatcaacaaatttgttattgaaagggaacctatcggtaagggaaggtcagattcctgtggttgccaagtgccgaaatctatcaaatgtgtcagatttcacattactgagcgaaggtcgagagtgatgcgtgaactggggaaggcttttaatcaatggagatttgataagatgggtgaagaagtaaaactctcctggtcgttggaagatcaaaagaagtttggagctatagtgaggtcaaatcctctatctcttgataagtgtttttgggacgagatattccgatgtttcccaagtaggagaagggaagatctggtgagctattactacaatgtatttcttttgcagcgcagagcaaaccagaataggtccactccagacagcatcaatagtgatgatgatgaatcagaatgtgaattagtaaactatggctctaggcgtgaggcagtcaattcaccaggctccctcatatcagcaaagaagcaacataaatatgttaaatag

SEQ ID NO: 2 - protein, 426 aa, Populus trichocarpa
MMDGSFSNEDVKGKDVDENLISDSRKSEKVENEDEVKSVVVVETDGDEEGNKGDNSEIEELDLATFEESVSSRKRKRDSIYRMLNWVTEIAKDPCDPVVGSLPEWSKWKSYGNEECWKQVLVTRESLFLKRNADSTSSAEGFVKQKYQKMHPCMYDDHAGSSYNLRERLKCRKLFPGETSSQALVCSQSSSAATQTDSDSCMEGVYDGDSSTECSVLDLPITKRIPVGPVFQAEVPEWTGMASESDSKWLGTRVWPLETSINKFVIEREPIGKGRSDSCGCQVPKSIKCVRFHITERRSRVMRELGKAFNQWRFDKMGEEVKLSWSLEDQKKFGAIVRSNPLSLDKCFWDEIFRCFPSRRREDLVSYYYNVFLLQRRANQNRSTPDSINSDDDESECELVNYGSRREAVNSPGSLISAKKQHKYVK

SEQ ID NO: 3 - DNA, 1803 bp, Medicago truncatula
atgttgggtagtgagcaaactttggatttgtataagctgttcatggtggtgaaggacaaaggtggttatgatgttgtttgtaagaatgagttgtgggatttggttggggaagaatatgggttgggtgtgaaagttggttcttcggttaaacttgtttatagtaagtatttgagtggtttagagacgcctttgaagaatgtcgttgatggtgagttcccgaagcgtgatttagtgggcgatagagttaagtttggggagcgtttaacggagttgcaggcggagttggtgttggatgattatggtgagggagatgtcggggatgaagtcaagagtgtatacggatgtaggaagaagttgtgtgatactaatagagtgaaggttgtgaatccagagttgaatgcgtctgaactcgaaaaggtatatgagtatatagatgggaggaagtcgtgtggtactaataaaatgaaggacacgaatcttgtgtctaatatggccaagaaagttgagagtgaaggactagttgacgtgcttatgcaggattgtaagacgaatgagactagtctcagaaagttggttaaccaaaatgctgcaatggaaataatggatgatgtatccgatgtagcaaacagcatgcctggattgtcagatggaagcaagagttgtgctaatgatgacgccaatgacagtggcgatgatgtcttgatgttggacccatctagtgttaatagagagagctttggtcgtaaaaggaagagagacgacttgatgtcagaaatgcaaagttgggttattagaactgcaaagaatccttgtgatcctgtgttaggttcaatgcctgaaaagtcaaagtggaagtcttacggtaatcaagagatctggaagaaggttttgttgtttcgagaagctgcctttttgaaaaaagattttggatcagactgcgaaaaactcagctggctggctcagaggatgcatccttccatgtatgatgttaaccttggggtaaattacaatcttagacaacggatcaaacgtgacaatggagttttagttggaaaatctgcatctatcttgcaaagaacacctgattccgaagctaaggaaaagttactcgactcctgtgttccagaatcaattcttgatgcacctcccacagtgaatatccctctcgggccaaaccatcaagctgaagtgcccgaatggactggcacaactcataagagtgattctaagtggctgggaactcaaatatggccactacaaattgtaaaatccaaacttttggaaggggaacctgtcggaaagggaagacaagattcatgccgttgccaagtacagggttctgtcgagtgtgttcgatttcacattgctgagaaaagcgctaaactcaagctggaaataggtgtggccttttaccagtggaatttagacaaagcaggggaagaagtgaggcgatgctggacggctgaagaagagaaaaagttcaaagatgtagtgaaatcgaaccctgcttcgcttgatagatgtttctgggacgatattttcacaacatttcctaagaagagcagggaaagtttagtcagctactacttcaatgtctttcttttgcagcgcagaggataccagaacaggcatactcctgataacattgacagtgatgatgaagaatcggaatttacaccattgaagggttcttttggacatcaaactgacaaatcaaacagcttcaccttattatcccctaagaagccacagccaacgccacatacaaaaggaagacagctagtgaatggcctcaaatcatga

SEQ ID NO: 4 - protein, 600 aa, Medicago truncatula
MLGSEQTLDLYKLFMVVKDKGGYDVVCKNELWDLVGEEYGLGVKVGSSVKLVYSKYLSGLETPLKNVVDGEFPKRDLVGDRVKFGERLTELQAELVLDDYGEGDVGDEVKSVYGCRKKLCDTNRVKVVNPELNASELEKVYEYIDGRKSCGTNKMKDTNLVSNMAKKVESEGLVDVLMQDCKTNETSLRKLVNQNAAMEIMDDVSDVANSMPGLSDGSKSCANDDANDSGDDVLMLDPSSVNRESFGRKRKRDDLMSEMQSWVIRTAKNPCDPVLGSMPEKSKWKSYGNQEIWKKVLLFREAAFLKKDFGSDCEKLSWLAQRMHPSMYDVNLGVNYNLRQRIKRDNGVLVGKSASILQRTPDSEAKEKLLDSCVPESILDAPPTVNIPLGPNHQAEVPEWTGTTHKSDSKWLGTQIWPLQIVKSKLLEGEPVGKGRQDSCRCQVQGSVECVRFHIAEKSAKLKLEIGVAFYQWNLDKAGEEVRRCWTAEEEKKFKDVVKSNPASLDRCFWDDIFTTFPKKSRESLVSYYFNVFLLQRRGYQNRHTPDNIDSDDEESEFTPLKGSFGHQTDKSNSFTLLSPKKPQPTPHTKGRQLVNGLKS

SEQ ID NO: 5 - DNA, 1689 bp, Arabidopsis thaliana
atggcgggttggtcgatggtagccgacgaggatgccgtcgattatagcaagactccaaagagtctcgatgcgaataggtctcctgaaagcgttaacccagaatctacagggtttgaaaagaagattaaagaactcatctccttgttccgacctttgcttgattcttttctcgctgagttttgttcggcggatggttttctacctcttcctgcgatgaccggtgaaggaaggaccgttgatttgttcaatctctttttgaacgtgactcacaaaggcggattcgatgcagtttctgagaatgggtcatgggatgaagttgttcaagagtctggattagagtcttatgactctgcatctgcgaaattgatctatgttaagtatcttgatgcatttggtcgatggttgaacagagttgttgcaggagatactgatgttagtagcgtggagttgtctggaatctctgatgctttggtggctagacttaacggttttttatctgaagtgaaaaagaaatatgagctgaggaaaggtagacctgcaaaggagttaggagcagagcttaaatggtttatttcgaaaacgaagagaagatatgataagcaccatgttggcaaagagtctgcttcgaatgatgctgtgaaagagtttcagggatcaaaattggcggagaggagactggagcagataatgatccttgaatcagttactcaggaatgctcttctcctgggaagagaaaacgagaatgtcctttggagacattgaaatggttaagcgatgttgctaaggatccatgtgacccatctcttggtattgtgccagatagatcagagtgggtatcttatggaagtgaagagccatggaaacaacttcttctgtttagggcctcaagaacaaacaatgattcagcttgtgaaaagacttggcagaaagtccagaagatgcacccatgcctgtatgatgatagtgctggagctagttacaatctaagagagagactgagttacgaggattacaagaggggaaagactgggaatggctcggatataggcagttcagatgaggaggatagaccatgtgctctagttgggtcaaagtttcaagctaaagtaccggagtggactggcataacccctgaaagtgattcaaagtggttgggcactcggatctggccactgaccaaagaacaaaccaaggctaatcttcttatcgaaagagatcgtattggaaaaggaagacaagatccttgtggctgccataatccaggatctattgaatgtgtcaagtttcatatcactgcaaaacgggataaactgaaacttgaacttggtccagctttctacatgtggtgttttgatgtcatgggtgaatgtactctccagtattggacagacttagaactgaagaagataaagtctttgatgagttctccaccgtcacttagcccagccttcatccatcaggccaagatgattcttccttcgaagagcagaggaaaaattgtgagctacttctacaacgtgacccttttgcagtacagagcaagtcagagtagaataacacctcacgatatagacagtgatactgatcaaatattcctccgcgcaacagagaatgaaaatccagcccccgaagcaaacacatttcagaaacccgccctgctttcgcctaataaaaaaagatgtcgatag

SEQ ID NO: 6 - protein, 562 aa, Arabidopsis thaliana
MAGWSMVADEDAVDYSKTPKSLDANRSPESVNPESTGFEKKIKELISLFRPLLDSFLAEFCSADGFLPLPAMTGEGRTVDLFNLFLNVTHKGGFDAVSENGSWDEVVQESGLESYDSASAKLIYVKYLDAFGRWLNRVVAGDTDVSSVELSGISDALVARLNGFLSEVKKKYELRKGRPAKELGAELKWFISKTKRRYDKHHVGKESASNDAVKEFQGSKLAERRLEQIMILESVTQECSSPGKRKRECPLETLKWLSDVAKDPCDPSLGIVPDRSEWVSYGSEEPWKQLLLFRASRTNNDSACEKTWQKVQKMHPCLYDDSAGASYNLRERLSYEDYKRGKTGNGSDIGSSDEEDRPCALVGSKFQAKVPEWTGITPESDSKWLGTRIWPLTKEQTKANLLIERDRIGKGRQDPCGCHNPGSIECVKFHITAKRDKLKLELGPAFYMWCFDVMGECTLQYWTDLELKKIKSLMSSPPSLSPAFIHQAKMILPSKSRGKIVSYFYNVTLLQYRASQSRITPHDIDSDTDQIFLRATENENPAPEANTFQKPALLSPNKKRCR

SEQ ID NO: 7 - DNA, 1722 bp, Arabidopsis thaliana
atgggaagttttaatgatacttcatgttcatatgttgatgttgagattaagtatgttgatgaatgtgaggagaggttaaggagattgtttgatcaagctttgttggtttttcttgaggaagagggtagtataaagcctctccctgcagttataggtgatggcaaaaatgttgatttgtttaagctgtttgtattggtgagggagagggaagggtttgatactgtgtctaggaaaaggttgtgggaagtagtggctgagaagttaggctttgattgttcactggttccttctttgatattgatttacttgaagtatttgaaccggatggagaaatgggcggtggaggaatctaggattgtgaattgggataataaggatagtgaaaagaaagggtgttatagtggtatgttgcatgagttagggaatggttttaagagtttgttggacaatgggaagtgtcagaaacgtaacagagctgttgcgtttggttgtaaccatatggaagagtcgtgttcagagtttgataggtctaggaagaggtttagagagagtgatgatgatgataaaggagtaggactgtctagtgttgttattagggaggagactgttgtatgtgctgtggaagaaggtttgtcggatttttccttggagaagcgagacgatttaccgggaatgttgaagtggctggctttggttgcaacatctcctcatgatcctgccattggagttataccgcatagttcaaaatggaagcagtataacggtaacaagtgttggctccaagtggctagagcaaaaaactctttgctggttcaaagagacaatgctgaactcagatatagatatcatccatttcggggtcaccaaaatatacatcatccgtctatgtatgaagatgatcgaaagtcgatagggaggttaagatacagcataagacctccaaatttatccaaacactgttcgagctcgtgttgcaatggaagcagtttggtctctctatctaaatcaagatctaccaaatgcagaaaactgacgatcattgcttctgagagagcaggccttactgcaggaacatctagagccagaaagcgaaacaaagcagagatcccgagaaggtgtattaaagtaggacatcaacaccaagcccaagtggatgaatggacagagtccggtgtagatagcgatagtaaatggttaggaacccgtatatggccgccagaaaatagtgaagctttagatcagacgcttggaaatgatttagttggaaaaggaaggccagattcttgcagctgtgagctctctggttttgtggaatgcactaggttgcacattgcagagaagagaatggaactgaaacgtgagctcggcgatgactttttccattggagattcaatcaaatgggagaagaagtgtgtctaagatggacagaagaagaagagaagaggtttaaagacatgatcatcgcggatcctcaatctttctggacaaatgcggcaaaaaatttcccaaagaagaagagagaggagcttgtgagttactacttcaacgtcttcttgattaacagaagacggtatcagaaccgtgtgactccaaaaagtatagacagtgatgacgaaggagcgtttggtagtgttggtggcagttttggtcgtgatgctgttacttcgtctggttcagatgttatgatctgtgctcagaatcgtcagtgtgaggactactga

SEQ ID NO: 8 - protein, 573 aa, Arabidopsis thaliana
MGSFNDTSCSYVDVEIKYVDECEERLRRLFDQALLVFLEEEGSIKPLPAVIGDGKNVDLFKLFVLVREREGFDTVSRKRLWEVVAEKLGFDCSLVPSLILIYLKYLNRMEKWAVEESRIVNWDNKDSEKKGCYSGMLHELGNGFKSLLDNGKCQKRNRAVAFGCNHMEESCSEFDRSRKRFRESDDDDKGVGLSSVVIREETVVCAVEEGLSDFSLEKRDDLPGMLKWLALVATSPHDPAIGVIPHSSKWKQYNGNKCWLQVARAKNSLLVQRDNAELRYRYHPFRGHQNIHHPSMYEDDRKSIGRLRYSIRPPNLSKHCSSSCCNGSSLVSLSKSRSTKCRKLTIIASERAGLTAGTSRARKRNKAEIPRRCIKVGHQHQAQVDEWTESGVDSDSKWLGTRIWPPENSEALDQTLGNDLVGKGRPDSCSCELSGFVECTRLHIAEKRMELKRELGDDFFHWRFNQMGEEVCLRWTEEEEKRFKDMIIADPQSFWTNAAKNFPKKKREELVSYYFNVFLINRRRYQNRVTPKSIDSDDEGAFGSVGGSFGRDAVTSSGSDVMICAQNRQCEDY

SEQ ID NO: 9 - DNA, 846 bp, Gossypium hirsutum
atgaagcaactccatttagggaaaatggcatcaaagggtcttgattggtcacagtcttcttcctttgggaatcatagccacttggataattctatattaagtgttgacaaaaatttgcgtgaatgtagtgactttacaacttcaagtctaatgttcaattataatgttgacatacaagttcctattgggccactttttcaagctgaagtactagagtggactggagtagctttagaaagtgatgcgaaatggttgggtactcttatttggccattggaaaaaaatgaatatagttttttgattgaaggggatcgaattggaaaaggaagacaagattcatgtagttgtcaaattcgaaattctttacaatgtgtaaaatttcatgttgctgagaaaaggttggaagtaaagcatgagttaggaccagctttcaaccaatggaattttgataagatgggtgaagaagttgcatttggttggaatgagaaagaaaaagatatgttttcatcaatagtgaagtcgaatcctccattaggaaaatgtttttgggatgagatatacaataattttcatgacaaaagtagggaagaacttgtttgctattatttcaatgtctttcttttacaacatagagcgtaccaaaatcaagtcgctcccaatagcattacctacgatgatgaggaagttgtattaggaccggaatcaattggtaaaggcattgggcctaaatcttacacttccatcttaattcctttaaggaagtcacaaaagaagtcaaaagatgctcttcctcaatttagtacggagcactttgacaaaaagatggaaaagtggaagtcgatttaa

SEQ ID NO: 10 - protein, 281 aa, Gossypium hirsutum
MKQLHLGKMASKGLDWSQSSSFGNHSHLDNSILSVDKNLRECSDFTTSSLMFNYNVDIQVPIGPLFQAEVLEWTGVALESDAKWLGTLIWPLEKNEYSFLIEGDRIGKGRQDSCSCQIRNSLQCVKFHVAEKRLEVKHELGPAFNQWNFDKMGEEVAFGWNEKEKDMFSSIVKSNPPLGKCFWDEIYNNFHDKSREELVCYYFNVFLLQHRAYQNQVAPNSITYDDEEVVLGPESIGKGIGPKSYTSILIPLRKSQKKSKDALPQFSTEHFDKKMEKWKSI

SEQ ID NO: 11 - DNA, 1782 bp, Glycine max
atggcagggcggtcggtgttgaacgccggtgttcgcgtagaagatagtggcagcattgttggatgctcaaacgacggttctcagcgccgtttcgaggagttggtttctgagttcacgagcgagatctgtgggagtgattattttttgccttttccgccaatgttgggtgatgggaaacctgtggatttgtataagctgtttttggtggtgagagggaagggtggatacgacgccgtttgcaattgtaagttgtgggatatcgttggggaggagtctgggttgggtgtgagtgttggttcttctgtgaagttggtgtatagtaagtatttgagtgctttggatgcgtggttgaagaaggttgcggagagtaagggtgatgtggctcgtgaggaggtcaagggtagagttgatgatgatgatgataatgtggatgggaggaagtcgtgtggtgatggaaatggagggtgtcttcctgatttggaggtgccggagggtgacatgaatgagtcggttattggaagtgggggtgagggaaatgagtcggtgaatggaaactcaggtgagggaaacgatgcaatggaagtgggggaagagtttgatagagggataatgtctaaagagcaggtggtggatgtatcagatggggtgaactacagtgtggctggattgttgagtggaggtcagaagtgtggcggcaatgatgataagggcttggttgatagtgatagttctgatcgtaagaggatgagagagtttgcgttggatatgctgagctgggttacaggtgccgcaaagaatccctgtgatcctgaagttggttcaatacctgaaaaggcaaagtggaagtcttacagtaatcaggaggtgtggaaacaggtgctgttgtttcgagaatcagcgtttctcaaaagaggttctgatccaagcagtgaacaacgtagctggcagagtcagaagatgcacccttgcttgtatgaagatcaccttgggacaaactacaatcttagggataggttgaaacgtgacaagaagattttagttggccaatctacaccatctgcacgaagctcttctgattcatctgtaggagctgagaacagaacaccaagtcctcatactgaagatccctctgatgcaaattcaggtcttgacagatgtgccaccgtacgcatccctttgggggcaaatcatcaagctgaaataccagaatggaccggtgtgatttctgaaggttattctaagttttcagggaccccgatatggccattggcaacagcaaataccagactacttattgaaagggaccctataggaaagggaagacaagattcatgcggctgccctgtaccaggttctgttgagtgtgtaagattccacattactgagaaaagggctaaagttcatctggaattgggggcagtattttatgactggaattttgatcaggtaggtgaagatgttaagctattgtggatggaagaagaagagaaaaaattcaaggatgtgatacgatcaaaccctccatcacctgagacatatttctgggaccatatctttagggcatttcctacgaagagcagggcagatttagttagctactacttcaatgtctttattttggagcgcagaggataccaaaataggcatactcccaataacattaacagtgatgacgaggacgatgaagctggaccactgaggaatgttttcggacagcagacacaaaattcgcgtggttccatcttattaacccccaaaaagtcacagacaaagaaaaagtag

SEQ ID NO: 12 - protein, 593 aa, Glycine max
MAGRSVLNAGVRVEDSGSIVGCSNDGSQRRFEELVSEFTSEICGSDYFLPFPPMLGDGKPVDLYKLFLVVRGKGGYDAVCNCKLWDIVGEESGLGVSVGSSVKLVYSKYLSALDAWLKKVAESKGDVAREEVKGRVDDDDDNVDGRKSCGDGNGGCLPDLEVPEGDMNESVIGSGGEGNESVNGNSGEGNDAMEVGEEFDRGIMSKEQVVDVSDGVNYSVAGLLSGGQKCGGNDDKGLVDSDSSDRKRMREFALDMLSWVTGAAKNPCDPEVGSIPEKAKWKSYSNQEVWKQVLLFRESAFLKRGSDPSSEQRSWQSQKMHPCLYEDHLGTNYNLRDRLKRDKKILVGQSTPSARSSSDSSVGAENRTPSPHTEDPSDANSGLDRCATVRIPLGANHQAEIPEWTGVISEGYSKFSGTPIWPLATANTRLLIERDPIGKGRQDSCGCPVPGSVECVRFHITEKRAKVHLELGAVFYDWNFDQVGEDVKLLWMEEEEKKFKDVIRSNPPSPETYFWDHIFRAFPTKSRADLVSYYFNVFILERRGYQNRHTPNNINSDDEDDEAGPLRNVFGQQTQNSRGSILLTPKKSQTKKK

SEQ ID NO: 13 - DNA, 1737 bp, Glycine max
atggaagaatggtcaacattctcaaatgggtcttccttagattgcattggaggagttgaacttgaaactgttggtgcatttcctggaaatggctgtggccttggaaagcaccatgttgataatggtgctgacaatggcaaacttaaacagaagtacttgttctaccaactgtttcctgcttacctgaaggatagttgttccaaaggtggtgttcggcctttgccagttttagtcgacggtcaatggctggatttgtacaaactgttcttcctgaaaagattgtggggttctgtgaccaaggaattgggcttgaaccttgtggtttgctggtctgtaaaattagtctatgacaagtatctgaatgatttcgataggtggctcaagaaaacttttgaagagaagaatttaaaaagcgggaaccatggagccctgttatgtccaaatctaaaggacaaagatgatcacaaacttgtcaagtcaaaatcaattaataaaaagaaaaacactgatttggatgttcaacgcattgaaggtgataatgatgaaaaatcaactaatggtcgggatgcattgtctggcatgctaaactggatgaagcatgttgcaaagcatgctcttgatcctttaactcaaccaatacctaaaccatcaaagtggaaggaatataaaggccaggacttttttggtcaatttctgagggcaagagagtttgctccaaagagagtaagctttagcataatggtaagcttgctgccttgcgactcagcgatcatgagttcgagtcatggtataggcctttttgctcatatgggcattatgcatgttataccaatatctcatatacaatcattccatatcttgtccctttttatgtggtttgtggtcaaatgtccatctgttcatctgttttttttaatggagcaaaaacagaagatgcaccctgccatgtatgaggatcatgttgctcttggttgccatgctacaagaaaattgagatgcagtgaaaggttgccgtcctttgttaaatctcggtcgtgctcgtgctgcaatccatctaagccatctggggatgagtctctcgaaaagcaagtttctgtaggtcctcgttttcaagcagaagtcccagaatggactggtgtattttctgagagtgactctaaatggttgggcacacatgtatggtctttgaaaaatgacactgaacctgctacagcaacagatgttgggagaggaagacaagagatgtgtagctgtgaatttcatggttctgttgaatgtgttagattgcatattgctgaaaataggatgaaattgaagcttgaattgggttctgaattttaccgtttgggatttgatcgtattggtgaggaagtttcacttcaatggacaactgaagaagaacagagatttaaggatatcatgaaatcaaatatttcctccaaaaataaatatttttggaacaatccatccaaatactttccaaagaagacaagaagaaacttggtgaactattacttcaatgtatttcttattcaactaagaacctatcagaatcgggtgactccagagagcgttgatagtgatgatgatgaagtagaatttggatctttcagcgatggttttgggatggacgctgtcaagagtcttggtgatgatttcctggagtgttctctgaacaagcagtgtactgatctcaaatacacaaaattagagtgcaaatttgataattggatctga

SEQ ID NO: 14 - protein, 578 aa, Glycine max
MEEWSTFSNGSSLDCIGGVELETVGAFPGNGCGLGKHHVDNGADNGKLKQKYLFYQLFPAYLKDSCSKGGVRPLPVLVDGQWLDLYKLFFLKRLWGSVTKELGLNLVVCWSVKLVYDKYLNDFDRWLKKTFEEKNLKSGNHGALLCPNLKDKDDHKLVKSKSINKKKNTDLDVQRIEGDNDEKSTNGRDALSGMLNWMKHVAKHALDPLTQPIPKPSKWKEYKGQDFFGQFLRAREFAPKRVSFSIMVSLLPCDSAIMSSSHGIGLFAHMGIMHVIPISHIQSFHILSLFMWFVVKCPSVHLFFLMEQKQKMHPAMYEDHVALGCHATRKLRCSERLPSFVKSRSCSCCNPSKPSGDESLEKQVSVGPRFQAEVPEWTGVFSESDSKWLGTHVWSLKNDTEPATATDVGRGRQEMCSCEFHGSVECVRLHIAENRMKLKLELGSEFYRLGFDRIGEEVSLQWTTEEEQRFKDIMKSNISSKNKYFWNNPSKYFPKKTRRNLVNYYFNVFLIQLRTYQNRVTPESVDSDDDEVEFGSFSDGFGMDAVKSLGDDFLECSLNKQCTDLKYTKLECKFDNWI

SEQ ID NO: 15 - DNA, 1632 bp, Glycine max
atgatgagtaatggtgatccattggatttgtataagcttttcatggtggtgaaggagaagggtggttatgatgctgtttgtaagaacaagttgtgggatttggtgggggaggaatatgggttgggtgtgaaggttggttcctctgttgaacttgcttatagtaagcatttgagttctcttgaggcatgtttgaagaatgttgctgatgatgggagggagttgtgtggtactaatagggtgaagggcatgagtccagagtctaatggggacaagaaagtccagagcgaaggacttgttgatttggatatgctggaccatgggacagatgagcatattatcagaaacttgtgcagccttaatactgagagggatatactggaagagtttgatggggggaaaatattaactgtggatgcatctgatgcagaaagcaacatgcctagattgtcggatggaagcaagagctgtgataacgatgatgatgacgatagtgatgatgtattgatattggatccatctggggttgacaaagagatatttggtcgtaagaggaagagagagtctaagtcagaaatgctaagttggattactagcattgctaaaaatccttgtgatcccacagttggttcgattcctgaaaagtctaagtggaagtcttacagtagtcaggagatctggaagcaggctttgctgtttcgagaagctgtctttttgaagaaagattttgagacaatcagtgaacagcttagttggcagggacagaaaatgcatccttccatgtatgatgatcgtgttggggcaatatacaatcttagacagaggttgaaatgtgacaagagagttttatttggaaaagctacatctgaaggagtctcctcagcttcatctggaggaacacatggatatttggagagaaccccaagttctcgtgctgaagattgtgctgagaaacagttgcctgactcctgtactgcacgctcaagtcttgatatatgtgccagagtgcccatccctttggggccaaaccatcaagctgaagtgccagaatggactgacataacttatgaggttgattctaagtggttggggacccaaatatggcctctaaaaactgtaaattccaagcatcatctttttgaaagggaccccattggagagggaagacaagattcatgtagctgccgagtacaaggttctgttgagtgtgtccggttccacattgctaagaaaagggctaaagttaagttggaattgggtgaggcatttcaccaatggaatttacataaggtaggtgaagaaattgggggttcatggacagagaaagaagagaagaagttcaaagatgtggtgaaatcaaaccctgcttcacttgagaaatgtttttgggatcatcttttcaaaacatttcctaagaagagcagagaagatttagtcagctactatttcaatgtctttcttttgcagcgcagagcatatcagaataggcatactcctgataacattgacagtgatgatgatgaatcagaatgcacaccattgaggaaagtttttggacatcatccaccaaaagcacgcagcttcaccttgttatcgccaaaaaaagccacattcaaaagggaaaataacaagtga

SEQ ID NO: 16 - protein, 543 aa, Glycine max
MMSNGDPLDLYKLFMVVKEKGGYDAVCKNKLWDLVGEEYGLGVKVGSSVELAYSKHLSSLEACLKNVADDGRELCGTNRVKGMSPESNGDKKVQSEGLVDLDMLDHGTDEHIIRNLCSLNTERDILEEFDGGKILTVDASDAESNMPRLSDGSKSCDNDDDDDSDDVLILDPSGVDKEIFGRKRKRESKSEMLSWITSIAKNPCDPTVGSIPEKSKWKSYSSQEIWKQALLFREAVFLKKDFETISEQLSWQGQKMHPSMYDDRVGAIYNLRQRLKCDKRVLFGKATSEGVSSASSGGTHGYLERTPSSRAEDCAEKQLPDSCTARSSLDICARVPIPLGPNHQAEVPEWTDITYEVDSKWLGTQIWPLKTVNSKHHLFERDPIGEGRQDSCSCRVQGSVECVRFHIAKKRAKVKLELGEAFHQWNLHKVGEEIGGSWTEKEEKKFKDVVKSNPASLEKCFWDHLFKTFPKKSREDLVSYYFNVFLLQRRAYQNRHTPDNIDSDDDESECTPLRKVFGHHPPKARSFTLLSPKKATFKRENNK

SEQ ID NO: 17 - DNA, 1578 bp, Glycine max
atgatgagtaatggtgatccattggatttgtataagcttttcatggtggtgaaggagaagggtggttatgatgctgtttgtaagaacaagttgtgggatttggtgggggaagaatatgggttgggtgtgaaggttggttcctctgctgaacttgtttatagtaaacatttgagttctctagaggcatgcttaaagaatgctactgatgatgggagggagttgtgtgatactaatagggtgaagggtgtgagtccagagtctaatggggacaagaaagttcagagcaaaggacttgttgatttggatatgctggacaatgggacggatgagcatattatcagaaacttgtgcagtcttaatactgagaggaatatactggaagagtttgatggggggaaaatattaactgtggatgcatctgatgcagagagcaacatgcctagattgtcggatggaagcaatgatgaagtcttgatattggatccatctggtgttgacaaagagatatttggtcgtaagaggaagagagagtctaagtcagaaatgctaagttggattactagcattgctaaaaatccttgtgattccacagtcggttcgattcctgaaaagtctaagtggaagttttacagtagtcaggagatctggaagcaggttttgttgtttcgagaagctgtctttctgaagaaagattttgagacaaccagtgaacagcttaattggcagggacagaaaatgcatccttctatgtatgatgatcgtgttggggcaatgaccccaagttctcatgctgaagatcgtgctgagaaattgttacctgactccggtactgctcactcaagccttgatagatgtgccagagtgcacatccctttggggccaaaccatcaagctgaagtgccagaatggactgtcataacttatgaggttgattcaaagtggttggggacccaaatatggcctccaaaaactgtaaattccaaatgtcgtctttttgaaagggaccccattggagagggaagacaaaattcatgtggctgccaagtacaaggttctgttgagtgtgtccggttccacattgctaagagaagggctaaagttaagttggaattgggtgaggcgtttcaccaatggaatttacataaggtaggtgaagaagttgggggttcatggacagagcaagaagagaagaagttcaaagatgtggtgaaatcaaaccctgcttcacttgataaatgtttttgggatcatcttttcaaaacatttcctaagaagagcagagaagatttagtcagctactatttcaatgtctttcttttgcagcgcagagcatatcagaataggcatactcctgataacattgacagtgatgatgatgaatcagaattcacaccattgaggaaaaattttaaatcacccttgattttggggagtaaaaaaattttacatgcttccaattttgagacatcccttctgtctgttggcagttttgacaagggttacttaaagttaaaagaacagcatatggaatatatagagcaacattttgttatagagtttcatgaacaaatgcagtga

SEQ ID NO: 18 - protein, 525 aa, Glycine max
MMSNGDPLDLYKLFMVVKEKGGYDAVCKNKLWDLVGEEYGLGVKVGSSAELVYSKHLSSLEACLKNATDDGRELCDTNRVKGVSPESNGDKKVQSKGLVDLDMLDNGTDEHIIRNLCSLNTERNILEEFDGGKILTVDASDAESNMPRLSDGSNDEVLILDPSGVDKEIFGRKRKRESKSEMLSWITSIAKNPCDSTVGSIPEKSKWKFYSSQEIWKQVLLFREAVFLKKDFETTSEQLNWQGQKMHPSMYDDRVGAMTPSSHAEDRAEKLLPDSGTAHSSLDRCARVHIPLGPNHQAEVPEWTVITYEVDSKWLGTQIWPPKTVNSKCRLFERDPIGEGRQNSCGCQVQGSVECVRFHIAKRRAKVKLELGEAFHQWNLHKVGEEVGGSWTEQEEKKFKDVVKSNPASLDKCFWDHLFKTFPKKSREDLVSYYFNVFLLQRRAYQNRHTPDNIDSDDDESEFTPLRKNFKSPLILGSKKILHASNFETSLLSVGSFDKGYLKLKEQHMEYIEQHFVIEFHEQMQ

SEQ ID NO: 19 - DNA, 1617 bp, Oryza sativa
atggactccgccggcgtcatcctctccatcctcagcaagctgcagtctctcggcttctgcgcccatctccggatcggcgacgccgcggcctccggccccccctcggacctgttcgacaccgtcctcgccgcgttcctccgcgaggtctacccgggcggccgcgaggtgcgccctctcccggcgaagctcggcgacgggagccgcgtcgacctgctccgcctcttctccgccatccgcgccgccggcggctacgccgcgacgtcgtcgtcccccgccgtctgggcctccgccgccgagtccgtttgcctcgacgccaccctcgccgcgcccgtcaagctaatctaccacaagtacctcgccgccctggaccgctggatccagaggctcgtggaggcgcatggacccttcctggatggcaacgacgggaggaagaagccagagccattcttcgattccaatggaagggagaatgaagaaccactcttggaatgcaatgggggagatctgcagcatccaatcttgaagaggaagagggaggacatggttgggatgttggattgggtcagggagcttgccgagaatggcggtgaggcaggcaccatggctgccggctcggcgaatgggtactactcgttggcgttggcagcgaggaaggcggtgttcgcgaagagggctcgccgctcgagcatgacgatgaatggtgcactcatgcaggaaatatttccaatggattgcaagtgctgcatgagttccagcactactggaattgacacacaagaaaaatgcagtaaaaagattcaacttgtcattccacaggctggttcagatattaatgaattgataaatgttgtagaaaacataaatgtgccttcaattggaatggagcaagagaacaacattattggacaagcgaaatatgagagtaggaaacatcataactctgacaactggctttttacgagtcagcagaggaacaaaataccagtgggctctgagttccaagcacaagtaccacaatggactggtgagttgcctgtaagctatgataatgcagaaaccaggaaatggttgggcacaaaggtctggcctctggaaaatggtaacaggaaattatcatatttttgtaaccctgttggaaaaggtagagaaggtgtttgtggctgcaaccttccaggatctgtagaatgtgttaggtttcatgttgcagaaaggagacttcagctgcgacgtgaacttgattcagctttctatgcatggggatttgatcgtatgggagaggaaatcgcactttcctggacagataaagaggaagcaaatttcaaggcttgcgtgcagcttaatgccccatcttcaggaaggaatttctggaagcgtctccatatgctttttcagtcaaagggtaggaaagaacttgtgagctactattttaattgttttctacttagacggaggtgttatcagaataggatgactccaaataacatagatagtgatgatgaggatgagacagaatttggattcttgggtaaccgccttggtcataatgcaactaagtatgacagttccaagtataccctttgcatcgaaagtacacactgcatggatctcaaccaatag

SEQ ID NO: 20 - protein, 538 aa, Oryza sativa
MDSAGVILSILSKLQSLGFCAHLRIGDAAASGPPSDLFDTVLAAFLREVYPGGREVRPLPAKLGDGSRVDLLRLFSAIRAAGGYAATSSSPAVWASAAESVCLDATLAAPVKLIYHKYLAALDRWIQRLVEAHGPFLDGNDGRKKPEPFFDSNGRENEEPLLECNGGDLQHPILKRKREDMVGMLDWVRELAENGGEAGTMAAGSANGYYSLALAARKAVFAKRARRSSMTMNGALMQEIFPMDCKCCMSSSTTGIDTQEKCSKKIQLVIPQAGSDINELINVVENINVPSIGMEQENNIIGQAKYESRKHHNSDNWLFTSQQRNKIPVGSEFQAQVPQWTGELPVSYDNAETRKWLGTKVWPLENGNRKLSYFCNPVGKGREGVCGCNLPGSVECVRFHVAERRLQLRRELDSAFYAWGFDRMGEEIALSWTDKEEANFKACVQLNAPSSGRNFWKRLHMLFQSKGRKELVSYYFNCFLLRRRCYQNRMTPNNIDSDDEDETEFGFLGNRLGHNATKYDSSKYTLCIESTHCMDLNQ

SEQ ID NO: 21 - DNA, 789 bp, Oryza sativa
atggcgttgatgttccgccgccagatgttcgtcgacgacggcttcagcgacaagccccatggctgcgcatcgcctgagcccgaggcaacagagcctgagagtggtcttacaactgaggatggacagtatgatggatgggatgatcaacaatctgcaggtgggagcagtaactggaattctcgtgcaaatcgctcttttggtctggcagatattccagaatggactgggaagccttcattaccttatgaagatccagatatgctgagatttcttggagagcctattttaactccaaaaaacaatgaggtctttgatgatactattggtaagggcaggccagacaagtgcaactgtgaagtcccaggttccacttcttgtgtcagatttcatgtggcagagaaaaagaccgagctgaagcgtgaaatgggctcatcatactatgcaatgaagtttgatgaaattggacaggatgcagcattaacatggcaaaaggatgaagaaaagaagtttgagaccattgtccagcagaatctgccttcatctaagtacaatttctgggacaagctgcgtgccgccttccgttacaaaggtgaacgtgcccttgtgagttactacaacaatgttttccagccgcgcagaagagccttccagaatcgagtagctcaacatgctaatggtgtagatagtgatgatgactcaattgaacctgccttcctacgccttcgtcaagacggtggtaagagtagatccaggtcttctgcttcctctaggaaccaaaatcagtcttag

SEQ ID NO: 22 - protein, 262 aa, Oryza sativa
MALMFRRQMFVDDGFSDKPHGCASPEPEATEPESGLTTEDGQYDGWDDQQSAGGSSNWNSRANRSFGLADIPEWTGKPSLPYEDPDMLRFLGEPILTPKNNEVFDDTIGKGRPDKCNCEVPGSTSCVRFHVAEKKTELKREMGSSYYAMKFDEIGQDAALTWQKDEEKKFETIVQQNLPSSKYNFWDKLRAAFRYKGERALVSYYNNVFQPRRRAFQNRVAQHANGVDSDDDSIEPAFLRLRQDGGKSRSRSSASSRNQNQS

SEQ ID NO: 23 - DNA, 687 bp, Prunus persica
atggcagggatggaggatcagttacttggaaccagtgatttcaccagtgtacttgacagatatcctccaagccacattcctctggggtcaaattatcaagctcatttaccagaatggactggtgaggcttctgaaagtgaattgaagtggttggggtccaagttttggccattggaaaaaccagagcacagatatctgattgagagggatcctattggaaagggaagacaagaatcttgcggctgccaagtgtcaggttctatagaatgtgtccgatttcacatttctgagaaaaggttaagagttaagcgagaactggggccagctttctaccattgggaattcaatcagatgggcgacgaagttgggctctcttggacagcggaagaagaaaagaagttcaaggacatagtaaagtcaaatcctccttctcttgggattaccttttgggatcagatattcaagtcttttcctaagaagagcaggagagaattggtaagctactacttcaatgtctttctcttgcaccgtagaggataccagaacaggtttactccgaacaatattgatagtgatgacgaaggattagagtcgggatcagtaactaatggttttggggatgaagaacgcaagccatcaaaatcaattttaaaatccccacacaagccacatgcaaaatgcagatag

SEQ ID NO: 24 - protein, 228 aa, Prunus persica
MAGMEDQLLGTSDFTSVLDRYPPSHIPLGSNYQAHLPEWTGEASESELKWLGSKFWPLEKPEHRYLIERDPIGKGRQESCGCQVSGSIECVRFHISEKRLRVKRELGPAFYHWEFNQMGDEVGLSWTAEEEKKFKDIVKSNPPSLGITFWDQIFKSFPKKSRRELVSYYFNVFLLHRRGYQNRFTPNNIDSDDEGLESGSVTNGFGDEERKPSKSILKSPHKPHAKCR

SEQ ID NO: 25 - DNA, 1278 bp, Populus trichocarpa
atggacggttctttttctaacgaggatgtaaaaggcaaggatgttgatgaaaatttgatatctgattcaaggaaaagtgagaaagtggaaaatgaggatgaggtgaagagcgtggtggtcgtggaaactgatggagatgaggaaggaaataagggtgataacagtgagattgaggaactggatttagcaacttttgaggaatctgtttctagtcgtaagaggaaacgggattccatttatagaatgctgaactgggttactgagattgcaaaagatccatgtgatcccgtggttggatcgttacctgagtggtcaaagtggaaaagttacgggaatgaagaatgctggaagcaggttttggtgacccgggaatcgttgtttctgaaaagaaatgctgattcaacttcaagtgcagaggggtttgttaagcagaaatatcagaagatgcatccatgtatgtacgatgaccatgctggatctagttacaatcttagagagaggttaaaatgtagaaagctttttcctggggaaacatcgtctcaagcacttgtttgctcacagtcatcttctgcagccacccaaactgattcagattcttgcatggaaggggtttatgatggtgattcttcaactgaatgttcagtgcttgacctgccaattacaaagagaattcctgtggggccagtttttcaggctgaagtaccagaatggactggcatggcttctgaaagtgactcaaagtggcttgggactcgggtttggccacttgaaacttcaatcaacaaatttgttattgaaagggaacctatcggtaagggaaggtcagattcctgtggttgccaagtgccgaaatctatcaaatgtgtcagatttcacattactgagcgaaggtcgagagtgatgcgtgaactggggaaggcttttaatcaatggagatttgataagatgggtgaagaagtaaaactctcctggtcgttggaagatcaaaagaagtttggagctatagtgaggtcaaatcctctatctcttgataagtgtttttgggacgagatattccgatgtttcccaagtaggagaagggaagatctggtgagctattactacaatgtatttcttttgcagcgcagagcaaaccagaataggtccactccagacagcatcaatagtgatgatgatgaatcagaatgtgaattagtaaactatggctctaggcgtgaggcagtcaattcaccaggctccctcatatcagcaaagaagcaacataaatatgttaaatag

SEQ ID NO: 26 - protein, 425 aa, Populus trichocarpa
MDGSFSNEDVKGKDVDENLISDSRKSEKVENEDEVKSVVVVETDGDEEGNKGDNSEIEELDLATFEESVSSRKRKRDSIYRMLNWVTEIAKDPCDPVVGSLPEWSKWKSYGNEECWKQVLVTRESLFLKRNADSTSSAEGFVKQKYQKMHPCMYDDHAGSSYNLRERLKCRKLFPGETSSQALVCSQSSSAATQTDSDSCMEGVYDGDSSTECSVLDLPITKRIPVGPVFQAEVPEWTGMASESDSKWLGTRVWPLETSINKFVIEREPIGKGRSDSCGCQVPKSIKCVRFHITERRSRVMRELGKAFNQWRFDKMGEEVKLSWSLEDQKKFGAIVRSNPLSLDKCFWDEIFRCFPSRRREDLVSYYYNVFLLQRRANQNRSTPDSINSDDDESECELVNYGSRREAVNSPGSLISAKKQHKYVK

SEQ ID NO: 27 - DNA, 1947 bp, Populus trichocarpa
atggcaggatggtcaattttgacaaatggttctgctttagattgtgttgatgatgttattaatatatacaagggtgatggtggttgttgtctagatattaatcatcatgtgaaggatgatgaggctaaggattggattgctattgataattctgatgaggatgattatgagtgtgaggataaagtaatatgcttgtttgatgaactcgtttcaaagtttttgaatgagaccgctgaaggagggtgtattaggcctattccagcattgcttggtgatgggcaatctttggatttgttcaaactcttttgggttgtgagaaagagaggtggctttgatttggtaaacggtttttggagctttgtggctaaagagttagggttagaacttcaattttcaccttcggttaagttgatatatattaagtacttgtatgagttggaaaaatgcatgagtaggagttgtaaagaggaaaaaataagaaaggggaagcgtcagtgtgatgggaatctgagttgttcgtcattggagctagagatgcagctcagaagtttattattgcatagatgtgatagaaagcaagaggattgtaaatttgcttcagaagtgtatgagaaaaatggcaggtacgttgagatggatactgggaagggtaaaataggtttgttagacaccaaagctgtacatcgagtacacaatggtgttggaaataggaattgtgattatgacaaaaaatttcatgctgaaagaaataattattttaatgatagtgatgatgatgttgtgatcttggatccgagcattgtcaagaaagaatttaattctcgcaagagaaaacgagaacctctaacaagaatgcttaactgggtgatccaaattgcaaaatgtcccgatgatccttccatcggagtaagatcaccacaatttaagtggaagaatcataaaggcaatgagttgtggctccaagccataagggcacgggaagctctcctacatagaaggcattttgatcctaacattgaacaatcactcttgcaggtatacaatatgaacttccaggacaatcgaaagatgcatccatccatgtttgaggatgttagtgttctaagtgaacactttgcagagaggtcaagatgcagcaagcggctccctgctctagcgaaacctgacgtatgctcttgttgtaattcatgttctgcccctcaaagtaaatctacaagccctcttaagacagagtgtgagaatggccttaaggagcaagaacttgctgttgatttatcatccaaaaacgcaacatttgatggatctggggatgggcatgtccgtaggcatgttgctgtgggccctctcttccaagctgaagtccctgagtggactagcgtggtttccgagagtgattctaaatggctgggcacacgattatggcctttggaatgtgaaaaccataatgccgtatttgccatggatccaattggaaatggaagacccagtgtatgtggctgtcagcttccaggttcagttggatgtgtgagatttcatattgccgagaaaagaattaaattgaagcttgaactgggttatttgttctatcattggcagtttgatcgcatgggtgaggaagtttcacttagatggactaccgaagaagaaaagagattcaaggatatggtcaagtttaaccttttatctgcaggcaagtgcttctgggacaataaacacaagtattttcctagaaagaccagggaagaattggtaagctattacttcaatgcatatcttgttcggcgcagaagttatcagaaccgtgtaactccaaaaaatattgatagtgacgatgatgaaacagagtttggatcttttagtgatggttatggccatgaagtactcatggttcctggtgcctacatgttgatatgttctgagaataagcaatgcactgatttcaaatag

SEQ ID NO: 28 - protein, 648 aa, Populus trichocarpa
MAGWSILTNGSALDCVDDVINIYKGDGGCCLDINHHVKDDEAKDWIAIDNSDEDDYECEDKVICLFDELVSKFLNETAEGGCIRPIPALLGDGQSLDLFKLFWVVRKRGGFDLVNGFWSFVAKELGLELQFSPSVKLIYIKYLYELEKCMSRSCKEEKIRKGKRQCDGNLSCSSLELEMQLRSLLLHRCDRKQEDCKFASEVYEKNGRYVEMDTGKGKIGLLDTKAVHRVHNGVGNRNCDYDKKFHAERNNYFNDSDDDVVILDPSIVKKEFNSRKRKREPLTRMLNWVIQIAKCPDDPSIGVRSPQFKWKNHKGNELWLQAIRAREALLHRRHFDPNIEQSLLQVYNMNFQDNRKMHPSMFEDVSVLSEHFAERSRCSKRLPALAKPDVCSCCNSCSAPQSKSTSPLKTECENGLKEQELAVDLSSKNATFDGSGDGHVRRHVAVGPLFQAEVPEWTSVVSESDSKWLGTRLWPLECENHNAVFAMDPIGNGRPSVCGCQLPGSVGCVRFHIAEKRIKLKLELGYLFYHWQFDRMGEEVSLRWTTEEEKRFKDMVKFNLLSAGKCFWDNKHKYFPRKTREELVSYYFNAYLVRRRSYQNRVTPKNIDSDDDETEFGSFSDGYGHEVLMVPGAYMLICSENKQCTDFK

SEQ ID NO: 29 - DNA, 1932 bp, Populus trichocarpa
atggcaggatggttaattttaacaaatgggtcttctttagattgtcctgatgatattatttatagatacaagggtggtggtggttgtccagatattaatcatcctatgaaggatgagattaaggagtgtattgttgttgatgattccgatgaggatgattgtgattgtgaggataaagtagtatgcttgtttgatgaagtggtttcgatttttttgaatgaggctgcagatggagggtgtattaggcctattccagcattgctcggtgatgggcaatcgttagatttgttcaaactcttttgggttgtgagaaagagaggtgggtttgatttggtaaatggtttttggagctttgtggctaaagaattagggctggatcttcgattttcgccttcagttaaattgatttatattaagtatttgtatgagttggaaaaatgtatgaagatttgtagcgatgagaagttaagaaaggagatgcatcaatgtgatgggaatttgagtttttcgttgttggagctagagatgcagtttagaagtttgttattgcttagatgtgatagaaagcagggagatggtaaatttgcttcactaggatataaggtaaatggcaggtacattgaaacagacactgggaagagaaaaataggtttgttaggcaccaaagatgtacatcgaatacacaatgatgttggagataggaatggtgatgatgatgatgaaaagtttcatggtgaaaaggagaattactgtgacgatagtgatgatgatgttgtgatcttggatccaagtattgctaagaaagaattcaattcccgcaagagaaaacgagaatctctaacaagaatgcttaactgggtaatccaaattgcaaaatgtcctgatgatccttctattcgagtaattcacagaggtgatgagttgtggtcccaagcaataagggcacgagaagctctcttgcaaagaaggcatgtcaatcctaacatcgaacaatcgctcgtgcaggtatgcaatatgaacttacagaacaatcaaaagatgcatccatccatgtttgaggatgttagttttctaagtgagcagtctgccgagaggtcaagatgcagcaagcggcatcctgctatagtgaaacctcatttatgctattgttgtaattcatgttcagcccatcaaagtaaatcagcaagtcttctcaagtgtgagaacgcctgtaaggagcaagaacacgaccttaagcaagaacttgtcattgatgatttatcatccaaacacacaacactcagtggatctggggataagcatgtccgtaggcacgtggctgtgggtcctctcttccaagctgaagtccctgagtggattggcgtggtttctgagagtgcctctaaatggctgggcactcgactatggcctttggaatgtgaaaacaataatgctccagttgcaatggatccaatcggaaagggagggatcagtttatgtggctgtcagcttccaggttcagttggatgtgttagatttcatattgctgaaaaaagaatgaaattgaagctcgaactgggtcctttgttctatcattggcggtttgatcacatgggtgaagaagtttcacttagatggaccactgaagaagaaaagagattcaaggatatggtcaggtttaaccctcaatctgcaggcaagtgcttctgggacaacaaacgtaagtattttcctagaaagaccagggaagaattgataagctattacttcaatgcatatcttgttcagcgcagaagttatcagaaccgtgtaactccaaaatatattgatagtgatgatgatgaaacaaagtttggatctctgagtgatgcttatggtcatgaagcactcacggttcctggtgccaacatgttgatctgttctgagaataaacaatgcaccgatttcacatag

SEQ ID NO: 30 - protein, 643 aa, Populus trichocarpa
MAGWLILTNGSSLDCPDDIIYRYKGGGGCPDINHPMKDEIKECIVVDDSDEDDCDCEDKVVCLFDEVVSIFLNEAADGGCIRPIPALLGDGQSLDLFKLFWVVRKRGGFDLVNGFWSFVAKELGLDLRFSPSVKLIYIKYLYELEKCMKICSDEKLRKEMHQCDGNLSFSLLELEMQFRSLLLLRCDRKQGDGKFASLGYKVNGRYIETDTGKRKIGLLGTKDVHRIHNDVGDRNGDDDDEKFHGEKENYCDDSDDDVVILDPSIAKKEFNSRKRKRESLTRMLNWVIQIAKCPDDPSIRVIHRGDELWSQAIRAREALLQRRHVNPNIEQSLVQVCNMNLQNNQKMHPSMFEDVSFLSEQSAERSRCSKRHPAIVKPHLCYCCNSCSAHQSKSASLLKCENACKEQEHDLKQELVIDDLSSKHTTLSGSGDKHVRRHVAVGPLFQAEVPEWIGVVSESASKWLGTRLWPLECENNNAPVAMDPIGKGGISLCGCQLPGSVGCVRFHIAEKRMKLKLELGPLFYHWRFDHMGEEVSLRWTTEEEKRFKDMVRFNPQSAGKCFWDNKRKYFPRKTREELISYYFNAYLVQRRSYQNRVTPKYIDSDDDETKFGSLSDAYGHEALTVPGANMLICSENKQCTDFT

SEQ ID NO: 31 - DNA, 510 bp, Panicum virgatum
atgaaaacagtaaagcattggtttgttgtgtccctattggcaaaggcagagaagttgtttgtgggttgcaacgatccaggatcagtggaatgtgttagatttcatgtagcagaacagagatttaagttgaaacgtgaacttggtgtagctttctatgcatggggatttgatcgtatgggcgaggagattgcactttcttggacagatgaagaggaggcaagtttcaaggctgtagcacagcataatgctcaatcttcaggcaggaatttctggaaccgtctccaattgaagggaaggaaagaactcgtgagctattattttaattgttttctgcttagaaggaggtgttaccaaaacaggataactccgaagaacatagacagtgatgatgaggaagagactgaatttagattcttgggtaatcgtcttggtcatggtgcagctaagtatcacaataccaagcacaccatctgcattgaaaatacacactctatggatctggatgactag

SEQ ID NO: 32 - protein, 169 aa, Panicum virgatum
MKTVKHWFVVSLLAKAEKLFVGCNDPGSVECVRFHVAEQRFKLKRELGVAFYAWGFDRMGEEIALSWTDEEEASFKAVAQHNAQSSGRNFWNRLQLKGRKELVSYYFNCFLLRRRCYQNRITPKNIDSDDEEETEFRFLGNRLGHGAAKYHNTKHTICIENTHSMDLDD

SEQ ID NO: 33 - DNA, 1710 bp, Sorghum bicolor
atggccggaagtcctgccccaccacctccctcgaagtccaattcctccgcgcctgcattcaaatcaaacgcctcgggcccaagccccggctacgagcccgcccagagctcctccacctcgccagcggcggcagcgcagccggtgccggtccctgttccatccgacgcgttggtcgctgtgttcagcgtcgttggcgagctccatgctcgcggctttctcgccgggtttgagatcccaaaggccgaggtcacggaagagggagcgtccgctctgttcgacggcgtcctcacggctttcctcgccgagctggcggggcaccccgcggttgcctcctggctcccgatcccgccgccgccgctcggggatggccggaaggtagagcttgtcagcctgttcctcgccgtgcgcgctcgcggcggcttctccgccgtcgcgtcctgggcggccgttgccgaggcggtcgggcttgaccccaccgccgacacggccgtcaagctgctgtacggtaagtaccttgcgctcctggagcagaacttggaggtggtcagcagcggcaatgccgacctgctcgtgggctccaagaagggcaggttcctgtcgtcgccgaccaagcgccccaccaccaccaccagcactggatcggcgcacctgaagcggaagagagacacgctcgcggggatgcttgactgggttcgtctcgtggcgaagaacccaggtaaacaagggaagaatcctggtggccacaaacgggcagtgattgaactccggcgccagatgttcgcagacaaagactgcctcgctcgctcggagctcgtggggatgctcaactgggtgcgtggtgtggcggcgagcgcaggtcaaccggggatcatcgggatgaatcctcctcctccagaccacttatcgactgctgttgagctcaggagccagatatcgctcccggggatgctctactggcttcgccttgtggcgaccagcccagctgaaccggagatcatggaggggagttcccttagctaccgctccacagcgcttctgttccggagcaagaagtttgcaaatataaaagacagcaggtggtctgctgcctcgccgcggagtggaattccacttcgtccttgtggccaagcagacattccagaatggacggggaagccttcatcgacttattatgatgatccacgcacactgaggtttcttggagaacctattctgcttccaggaagtactgaagatcctgatggtgcttccattggaaaagggaggcaagatgactgcaactgtaaggtcccaggttccattacttgtgtcaggtttcatgtggcagaaaaaaagatcaaactgaaggatgagctgggctcagcatactttgaaatggggtttcatagaatcggggaagatttagcactaacatggacaaatgatgaggagaggaaattcaacaccactatccaggaaaacttgccttcatctacgaacaagttctgggacaagttgcttgccgtcttgcatgacaaaggcagaaaaggccttgtgagctattaccacaatgttttccaggcctggcgacgggcctaccagaaccgcctgggtcaaaatgctgatagtgatgacgattccatagagcctggtctcctatatgctcgtcaacgtgttgatcagagtcgctccaagtcagctggttcttccaggaagcggaggagatcttag

SEQ ID NO: 34 - protein, 569 aa, Sorghum bicolor
MAGSPAPPPPSKSNSSAPAFKSNASGPSPGYEPAQSSSTSPAAAAQPVPVPVPSDALVAVFSVVGELHARGFLAGFEIPKAEVTEEGASALFDGVLTAFLAELAGHPAVASWLPIPPPPLGDGRKVELVSLFLAVRARGGFSAVASWAAVAEAVGLDPTADTAVKLLYGKYLALLEQNLEVVSSGNADLLVGSKKGRFLSSPTKRPTTTTSTGSAHLKRKRDTLAGMLDWVRLVAKNPGKQGKNPGGHKRAVIELRRQMFADKDCLARSELVGMLNWVRGVAASAGQPGIIGMNPPPPDHLSTAVELRSQISLPGMLYWLRLVATSPAEPEIMEGSSLSYRSTALLFRSKKFANIKDSRWSAASPRSGIPLRPCGQADIPEWTGKPSSTYYDDPRTLRFLGEPILLPGSTEDPDGASIGKGRQDDCNCKVPGSITCVRFHVAEKKIKLKDELGSAYFEMGFHRIGEDLALTWTNDEERKFNTTIQENLPSSTNKFWDKLLAVLHDKGRKGLVSYYHNVFQAWRRAYQNRLGQNADSDDDSIEPGLLYARQRVDQSRSKSAGSSRKRRRS

SEQ ID NO: 35 - DNA, 1545 bp, Sorghum bicolor
atggactccgccgccgccgtcctcgccatacttagcaagctgcagtccctgggcttctgtgctgatctccggatccccgacgccgccgcggcctccgacccctcggaggcgttcgacgccgtcctcgccacattcctccgcgaggcctacaccggcggccgcgaggcgcggcctatcccggtggcgcttggagatggccggtgcgtcgacctcctccgcctcttcctcgccgtccgcgccgcggggggctacgccggcgtgcccaactcaccaggcggctgggccgccgccgccgagtctgccggcgttgactccgccctcgcggcgcctgtcaagctggtctacgccaagtaccttggcgtcctagaccgctggatccagaggcttgtggaagcgcacgggcccttcttggatgtcgacatgaggaagaggcaagagctgttctttggtgccaatggtgtggaggaagaagaagaagaagggctcttgaactgcaacgggagggagcagcggcatgtgatgttgaagcggaagaggggggacgtggttgggatgctgggttgggtgagggagatagctgagaaggctggcaatggtgttgctgtggctgctgggacctcggatctgtacttctcaatggcattggcggtcagggagatggttaccgggaagagggctcgccgagcaagcatgttgaatggctcactttttcaggaaatattcccaatggcttgcaattgctgtacaagtcctaccagtgttggaatttgttcaaaagcaaagttactgaatggttctttagtgttcacagaacaggagaacaacttggctggagaagggaaacatgggactaggactcataattcttctaatggttggctttttacaagccaccagaagaatgaaataccagttggtccagactatcaagtacacgtgccacaatggactggagaggtgcctgtaaattatgatgatccagaaacactgaaatggttgggaacaaaggtctggcctccagaaaatgaaagctgtaaaacattgttttgtggtgatcctattggcaaaggtagagaagttgtttgtggttgccactatcctggatcagtggaatgtgttcggtttcatgtagcagaacggagacttaagttaaaacgtgaacttggtgtggctttctatgcatggggattcaatcgcatgggtgaggagattgcactttcttggacagatgaagaggaggcaagtttcaaggctgcagcacaacatagtgctgcatcttctggcaggaatttctggaaccgcctccacttattttttcaattcaaggggaggaaagaactggtgagctattattttaattgttttctgcttaggaggaggtgctaccaaaacaggatcactccaaagaacatagacagtgatgatgatgaagaaacagaatttagattcctagggaatcgacttggtcactttgcagctaagtatcacagtaccaagcacaccatctgcattgaaaatacacacactatggatctagacgagtag

SEQ ID NO: 36 - protein, 514 aa, Sorghum bicolor
MDSAAAVLAILSKLQSLGFCADLRIPDAAAASDPSEAFDAVLATFLREAYTGGREARPIPVALGDGRCVDLLRLFLAVRAAGGYAGVPNSPGGWAAAAESAGVDSALAAPVKLVYAKYLGVLDRWIQRLVEAHGPFLDVDMRKRQELFFGANGVEEEEEEGLLNCNGREQRHVMLKRKRGDVVGMLGWVREIAEKAGNGVAVAAGTSDLYFSMALAVREMVTGKRARRASMLNGSLFQEIFPMACNCCTSPTSVGICSKAKLLNGSLVFTEQENNLAGEGKHGTRTHNSSNGWLFTSHQKNEIPVGPDYQVHVPQWTGEVPVNYDDPETLKWLGTKVWPPENESCKTLFCGDPIGKGREVVCGCHYPGSVECVRFHVAERRLKLKRELGVAFYAWGFNRMGEEIALSWTDEEEASFKAAAQHSAASSGRNFWNRLHLFFQFKGRKELVSYYFNCFLLRRRCYQNRITPKNIDSDDDEETEFRFLGNRLGHFAAKYHSTKHTICIENTHTMDLDE

SEQ ID NO: 37 - DNA, 1605 bp, Vitis vinifera
atgcccatggatggatggtcggttccgagaaatgggtctgtcttggattgtggtgaaacgggtgggagttgtgagactgatgggatttgtgttgacattggtaataataattctctgaatggcactgataaacttcaggttttattcgatcaagttttgttgattttcatgaaggaggttcttgggaatgagtgtgttaggcctattccggcaatgcttggcgatgggcggtctgtggacttgttcaaacttttctgggttgtgagggggaaggggggttatgagtgggtttctgataaagggttgtggggtttggtggcagaggaatgtgggttggatgttggtgttaagacatgcctaaaattgatttacttcaagtatttggatcagttggatcagtggttacttgggattttacgggatgggagattgatattgggtgggacgggcccaaaagagaaagatgatggagttttcgaattagaatctgagagaactgacaactgcgttgatttggacaaggagaaaagtattttgaatctaaaaagagaatctttttcaggaatgctgaattgggtgagagaaattgcaaaacatcctgaagagccttataaggggaataagaatggaaatgaggttttctcaacccagattttaagggtacgggagttgagcccaaaacgaaggcctttcagcccaagaacagaaacgtccgtccttttaaaagaagtctccctgccccctttcacatgtccatcagcagtacctaccctaccctccacaacaaagtcaaggtgcagtagaaggcttttttcagtgaaatctcacttatgttcatgttcagctgctcaaagtaaattgccaggtcctcacaggacaaagtcagagagttgccccaaagagcaagcattgacccctaatgagcaagagcctgagaacacaaatactttagatgacctgtttccagatgatctcttcctaaagcccattcctgtgggccccaactttcaagctgaagtacctgaatggactggtgaggttactgagagtgactccaaatggctgggcacacaggtatggcctttggaaaatggggaatgcagtttccgtattgaaaaggactgtgttgggagaggaaaaccagattcttgtgactgtcggttttcaggttctgttgaatgtgtcagatttcatattgctgagaagaggatgaaattgaagcttgacctgggctcattgttctatcattggagatttgatcgtatgggtgaagaaatttcactggcatggacaactgaagaagaaaagaggttcaagcatatgataaggttgaattcctcattgcagagtccatccttttgggataatgcattgagaatctttcctaccaagacaagggaggccttggtaagctattacttcaacgtgttccttatcaggcgcagaatttatcagaaccgagtgactccaagaaagattgacagtgatgatgatgaattagagtttggatctttgggtggcagtttcgggcatgaagtgattaaggttccatggtctgaattcctgacatgcacccagaatgagcagtctactgagttggattaa

SEQ ID NO: 38 - protein, 534 aa, Vitis vinifera
MPMDGWSVPRNGSVLDCGETGGSCETDGICVDIGNNNSLNGTDKLQVLFDQVLLIFMKEVLGNECVRPIPAMLGDGRSVDLFKLFWVVRGKGGYEWVSDKGLWGLVAEECGLDVGVKTCLKLIYFKYLDQLDQWLLGILRDGRLILGGTGPKEKDDGVFELESERTDNCVDLDKEKSILNLKRESFSGMLNWVREIAKHPEEPYKGNKNGNEVFSTQILRVRELSPKRRPFSPRTETSVLLKEVSLPPFTCPSAVPTLPSTTKSRCSRRLFSVKSHLCSCSAAQSKLPGPHRTKSESCPKEQALTPNEQEPENTNTLDDLFPDDLFLKPIPVGPNFQAEVPEWTGEVTESDSKWLGTQVWPLENGECSFRIEKDCVGRGKPDSCDCRFSGSVECVRFHIAEKRMKLKLDLGSLFYHWRFDRMGEEISLAWTTEEEKRFKHMIRLNSSLQSPSFWDNALRIFPTKTREALVSYYFNVFLIRRRIYQNRVTPRKIDSDDDELEFGSLGGSFGHEVIKVPWSEFLTCTQNEQSTELD

SEQ ID NO: 39 - DNA, 1656 bp, Vitis vinifera
atggcagggtggtcgatgattgctgatgggtctgcgttagattgcgtgaaaatcctcaagcctcaggagaacgggttgtggtttgtactggagcccggctcaaaagggattgtagtaggagggggcgggatcagtgagcttcgatgcagtttcgatcaatttttgggtccatttctgaagcagatccgtgggcacaacagttataggcctctgcctccaatgcttggtaatgggcaatgtgtggacttgttcaaacttttcttgcttgtgaaggaaaaaggtggataccgtactgtttctgagaatgtgttgtggaatttggtggctgaagaatccgggttggattctggtgttggctcagctctgaaattggtatacatcaagtacttagatctattggatagatggttggatagaatttttaaagacaagaaatcacacggtagtttgagtgtttgtggtgacacttcgggaaggcttttaatggagttagagacagaatttaaagggttcttaccggaaattttggatcaaaagatgaaagatgaggaatacccacattttgatttggcaaagagtgagtcaagtttttcgggtgtggaaaatttgtattgcaatgatgaggtgaagagtgatgtgaaggtggagtcagagggaggtgtgaaatgtgttgatgataatgatgaggtgaagagttcacggaagcgagaatatatgttggggatgctgaattgggttaccacaattgcaaagaatccatgtgatccttctataggaaagttgccggaaaggtcaaagtggaagttgactgggccaggggaattgtggaagcaggttttgttggtccgagaggcattgtttctccaaagggatgttgatttgagtgctgaacaatcaatttggcagaagaaacagaagatgcatccatctatgtatgaggatcatgctggatctgaaagattaagatacagccagaggcttctttctgggaaaaggtctaggtcgcgtgcttctggtttgtgtggtgatagtcatgtacgaaagcgccctgttgggccagcttttcaagcaacaataccagagtggacaggggtggtgtctgaaattgactctaaatggttgggtacccgggtttggccactggacaaaatagagcataaatttctaattgaacgggatcctattggaaagggaaggcaagattcatgtggctgccaattcccaggttccattgcatgtgtccaatttcatgtagctgagaaaaggatcagaataaagcttgaattgggctcagccttccaacactggcaatttgataagatgggtgaggtagttggactatcttggtcagaggaagaaaagaagaggttcaaggaaatagtgagattaaatcctccatccatgggtgtgcgtttctgggatgagatattcaagtcattttctaccaaaagcagagaagatttggtgagttactacttcaatgtctttctcctacagcgcagagctgaccagaataggcttactccaaacaacattgacagtgatgacgatgaatcagaatttggaccattgagtaatgggtttgggcatgaagcaatcaatttaccaagttccatcttatatgcccagaacaatccacatatgaatttcaggtag

SEQ ID NO: 40 - protein, 551 aa, Vitis vinifera
MAGWSMIADGSALDCVKILKPQENGLWFVLEPGSKGIVVGGGGISELRCSFDQFLGPFLKQIRGHNSYRPLPPMLGNGQCVDLFKLFLLVKEKGGYRTVSENVLWNLVAEESGLDSGVGSALKLVYIKYLDLLDRWLDRIFKDKKSHGSLSVCGDTSGRLLMELETEFKGFLPEILDQKMKDEEYPHFDLAKSESSFSGVENLYCNDEVKSDVKVESEGGVKCVDDNDEVKSSRKREYMLGMLNWVTTIAKNPCDPSIGKLPERSKWKLTGPGELWKQVLLVREALFLQRDVDLSAEQSIWQKKQKMHPSMYEDHAGSERLRYSQRLLSGKRSRSRASGLCGDSHVRKRPVGPAFQATIPEWTGVVSEIDSKWLGTRVWPLDKIEHKFLIERDPIGKGRQDSCGCQFPGSIACVQFHVAEKRIRIKLELGSAFQHWQFDKMGEVVGLSWSEEEKKRFKEIVRLNPPSMGVRFWDEIFKSFSTKSREDLVSYYFNVFLLQRRADQNRLTPNNIDSDDDESEFGPLSNGFGHEAINLPSSILYAQNNPHMNFR

SEQ ID NO: 41 - DNA, 2445 bp, Zea mays
atggcaggtgcacccgatccaagcatggcgtcggccctggaagcgcagtccaaatccatggaggcgcaatcaaggacgctggcgactcaatcccaacttcttcaacaactctgtgatcgattggagtcacaagatcaccgatggtcccagatggaggatgcggtcaagatgaacaccaccaatatctccaagttacaggagaagctgggtgatggagagattgaagcattccgaacggatctcacccgttccttgggcgaccgcgtcgaagcacagatcgctcaattggaggcagcaaccttggggcgtgtcgatggattggtgaccgagacctccaatcgggtggcggtgctggagaacgccacctcggcgttcgagtcttggcggccacgagtcgaacattctgtggacggcatcaggaactccgtggacaccttgcgctcggaccttgctcggctgacccaattcctcgagcgcaacaacaacaccacaggagatcatcacggccaagacagcatccttggaccatatgtaccagcgggagagcacacatctgcttccccgacttgtactggaaggcccgacgggcacggcactgcaactactaaccgagagtatggttttgggaaaccacacccaatccaactcccgatcaatggccaaaagtttaagaacaaggagcaaatccattctcctattcccacgcagcacacaaaaatggccggaaatcctgccccaccacttcccttgaagtccagttcctccgcgcccgctttcaaatcaaacgcctcgggctcaagccgcggccacgagcccgccaaggcttcgtccacctcgccagcggcggcagagctgccggtcccgatcccgtccgactcgttggtcgccgtgcttggcgtcgtcggcgagcttagtgctcgtggtcttctccaggggtttacgatcccggaggccggcgggctcacggacgagggcgcgtccgctgtgttcgacggcatgctcacggccttcctcgccgagcatggggtcgaccccgcggctgcctcctgcctcccgatccccccgccgccgctcggggacgggaagaaggtagagcttgtcagtctgttcctcgccgtgcgcgctcgcggcggcttctccgccgtcgagtcctgggctgccgttgccgaggcggtcgggcttgaccccaccgccgacacggccgtcaagcttctgtacggtaagtatcttgcgctcctggagcagagctgcgataaacccttaaagcaggaccacatggtggtgagcagcggcaatgccgacgtgctcatgggctccaagaaggaaaggttcctgtcgccgatcaagtgcctcaccagtactgctggatcggcgtcggcgcacctgaagcggaagagagaaacgctcgtggggatgcttgactgggttcatcttgtggcgaagaacccaggtaaacaagggaagaatcgtgctgctggccacaaacaggcagtggttgttgaactacggcgacagatgttcgcagacaaagattgccttgcccgagaggagctcgtgaagacgctcaactgggtccgccttgtggcgaagagcgcaggacacccggggatcatcgggatgaataatcgtccagaccacttagcgactgctgttgagctcaggagcgcgatgtcgctcgtggggatgctcgaatgggttcgccttgtggcgaccagcccagctgaaccggtggtcatggaggggaattccctcagctaccgctccacagcgcttctgttccgggagcagaagtttgcaaataagaagtgcagcaggtggtctgctgcatcgccgcagagtggaatttcaattcgtccttgtggccaagcagacattccagaatggaccgggaaacgttcatcgccttacgatgatccacgcacactgaggtttcttggagaacctattctgcttccaggaagtaccgaacatcttgatggcgcttccattggaaaagggaggcaagatgactgcaactgtcagttcccaggttccattgcttgtatcaggtttcatgtcgcagaaaagaagatcgaactgaagcatgagctaggctcagcatactatgaaatggggtttcataggatcggcgaggatttagcactgacatggacgaaggatgaggagacgaaattcaacagcactgtccaggacaacatgcctgcgtctaagaacaagctctgggacaagctgcttgccgtcttgcatgccaaaggcaaagaaggccttgtgagttattaccacaatgttttccaggtctggcgacgggcctaccagaaccgcctggctggaaatgctgatagtgatgacgattccatagagcctggtttcctatactttcgtcaaggtggtgatcggagccgctccaggtcagctgcttcttccaggaaacggaggagatcttag

SEQ ID NO: 42 - protein, 814 aa, Zea mays
MAGAPDPSMASALEAQSKSMEAQSRTLATQSQLLQQLCDRLESQDHRWSQMEDAVKMNTTNISKLQEKLGDGEIEAFRTDLTRSLGDRVEAQIAQLEAATLGRVDGLVTETSNRVAVLENATSAFESWRPRVEHSVDGIRNSVDTLRSDLARLTQFLERNNNTTGDHHGQDSILGPYVPAGEHTSASPTCTGRPDGHGTATTNREYGFGKPHPIQLPINGQKFKNKEQIHSPIPTQHTKMAGNPAPPLPLKSSSSAPAFKSNASGSSRGHEPAKASSTSPAAAELPVPIPSDSLVAVLGVVGELSARGLLQGFTIPEAGGLTDEGASAVFDGMLTAFLAEHGVDPAAASCLPIPPPPLGDGKKVELVSLFLAVRARGGFSAVESWAAVAEAVGLDPTADTAVKLLYGKYLALLEQSCDKPLKQDHMVVSSGNADVLMGSKKERFLSPIKCLTSTAGSASAHLKRKRETLVGMLDWVHLVAKNPGKQGKNRAAGHKQAVVVELRRQMFADKDCLAREELVKTLNWVRLVAKSAGHPGIIGMNNRPDHLATAVELRSAMSLVGMLEWVRLVATSPAEPVVMEGNSLSYRSTALLFREQKFANKKCSRWSAASPQSGISIRPCGQADIPEWTGKRSSPYDDPRTLRFLGEPILLPGSTEHLDGASIGKGRQDDCNCQFPGSIACIRFHVAEKKIELKHELGSAYYEMGFHRIGEDLALTWTKDEETKFNSTVQDNMPASKNKLWDKLLAVLHAKGKEGLVSYYHNVFQVWRRAYQNRLAGNADSDDDSIEPGFLYFRQGGDRSRSRSAASSRKRRRS

SEQ ID NO: 43 - DNA, 1539 bp, Zea mays
atggactccgccgccagcgtcctcgccatcctcagcaagctgcagtccctcggcttctgcgccgatctccgggtccccgacgccgtcgcggcctccgacccctcggaggcgttcgacgccgtcctcgccacgttcctgcgcgaggcctacaccggcggccgcgaggcgcggcctatccccgtggctcttggaaatggacgatgcgttgaccttctccgcctcttcctggccgtccgcgctgcagggggctacgccggcgtgcccaacactcccggtggttgggctgccgccgccgagtctgctggcattgactccgccctcgcggcgcccgtcaagctggtctacgccaagtaccttggtgccctagaccgctggatccagaggctcgtggaagcacatgggcccttcttggacggcgacatgaggaagaggcaagagctgttcattggtaccgatggagtggagggagaagaagggctcctgggctacaatgggagggagcagcggcatgtgatgcttaagaggaagaggggggacgtggttgggatgttgggttgggtgagggagatggccgagaatgctggcaatgatgttgctgtctctgctgggtcgtcggctgagtgcttctcaatggcattggcggtcaggaagatggttaccacgaagaaggctcgccgagcaagcatgttggacgcctcactttttcaggaaatattcccaatggcttgcaattgctgtataggtcctaccggtgttggcaattgtgcaaaagcaaaactactgaatggttcttcagtcctcacaaaaccggacatcaacttgactggagaagggaaacacgagtctaggactagtaactcttctaatggttggctttttaaaagccatcagaaaaatgaaatacctgttggccccaactatcaaatacacgtgccacaatggactagtgaggtgcctacaaattatgatgatccagaaactctgaaatggttgggaacaaaggtctggcctccagaaaatgaaggctgtaaaacattgttttgtggtgatcctattggcaaaggcagagaagttgtttgtggttgcgtttatcctggatcagtggaatgtgttcggtttcatgtagcagaatggagacttaagttgaaacatgaacttggtgcagctttctatgcatggggattcaatcgtatgggtgaggagattgcactttcttggacagatgaagaggaggcaagtttcaaggccgcagcacaacatagtgctgcgtcttctggcaggaatttctggaaccgcctccacttattttttcaatttaaggggaggaaagaactggtgagctattattttaattgttttctgcttcgaaggaggtgctaccaaaacaggatcactccaaagaacatagacagtgatgatgacgaagaaacagaatttagattcctggggaatcgacttggtcaccgtgcagctaagtatcacagtaccaagcacaccgcctgcattgaaaatacacactctatggacctggatgagtag

SEQ ID NO: 44 - protein, 512 aa, Zea mays
MDSAASVLAILSKLQSLGFCADLRVPDAVAASDPSEAFDAVLATFLREAYTGGREARPIPVALGNGRCVDLLRLFLAVRAAGGYAGVPNTPGGWAAAAESAGIDSALAAPVKLVYAKYLGALDRWIQRLVEAHGPFLDGDMRKRQELFIGTDGVEGEEGLLGYNGREQRHVMLKRKRGDVVGMLGWVREMAENAGNDVAVSAGSSAECFSMALAVRKMVTTKKARRASMLDASLFQEIFPMACNCCIGPTGVGNCAKAKLLNGSSVLTKPDINLTGEGKHESRTSNSSNGWLFKSHQKNEIPVGPNYQIHVPQWTSEVPTNYDDPETLKWLGTKVWPPENEGCKTLFCGDPIGKGREVVCGCVYPGSVECVRFHVAEWRLKLKHELGAAFYAWGFNRMGEEIALSWTDEEEASFKAAAQHSAASSGRNFWNRLHLFFQFKGRKELVSYYFNCFLLRRRCYQNRITPKNIDSDDDEETEFRFLGNRLGHRAAKYHSTKHTACIENTHSMDLDE

SEQ ID NO: 45 - DNA, 1500 bp, Arabidopsis lyrata
atgttgtggtgcatgtttgttatactatcatttacttgtttcactgtcgagtttattgcatttgattacccattatgcaggttgaaaatgggattcaaacgcccttttgaagatgagaaatttcatgagctcccactcaaacattctagacaacttggctataccgataagtcgactcagtttgaagaagttagtcctcaccatgctggttttcagaaaactgttgccacggtgaatgagggaaatctttgtaagtcacaaggcggtgaatcttctgatgctgatatgtttggcgaagagtccaattttgtttacccggttcatgacatggatgatacttttacatgggatacaaaaggttgtggtggaagagatgcaactaactctccccattctggaaagtattttgagctagatatacctccaagagtgtttgctcctgttgagactttctattcattcctcctggatcaacctgccagaaagaaagtgcccattggaccaggttatcaagccgaaattcctgaatgggaaggtagtcagactggaaacacagagccctcaggcatgtcggttcaaaatcacattagtggatgtgctgatggtgataagttgtttggtacatctgttattcccatgcctggtttgactacatttgcacatatggatgacatagtagggaagggtagaaagttctgtgtctgccgggacatgggttctgtcaggtgtgtgtgccagcacatcaaagaagctagagaagacttagttaagacgtttggaaatgagacattcaaaggcctgggcttatgtgatatgggggaagaagttgcacggaactggagcgatgaagatgcacaactttttcatgaggttgtttattccaatcctgtaacattgggtcggaacttttggaagcacttggaagctgcattttgttcccgaactcagaaagagattgttagcttctactttaacgtttttgtcctcggaaggagagccattcagaacagagcttttatattggacattgacagtgatgatgatgaatggcatggatgttatggaggctcttcgggttttccttatgttgaagaagatgaagaagactctgctattgagtctcctcttcatcaagggactgagaaagtgtatccactccatcacgaagaggatgaagaagatgccaataatagcggcaatgatgaagatgatgcctatgttgatactagagaaagtggcactggactgtatgacgagcacacgatgaattcaacagttgaatacatggatagattttctgggaacaatggggagagactgaacttggaagatgactcgtgcacgtcctttgaacttgcacatgatgcaagcatcagaagaagtgtaatgatccaatggacggacactaaagtctgggctgattcgagttgtttgaatgtttcaacaaatggcaaagatcttcaaccaacgcggagaatcatggaggaaaatatttggtaa

SEQ ID NO: 46 - protein, 499 aa, Arabidopsis lyrata
MLWCMFVILSFTCFTVEFIAFDYPLCRLKMGFKRPFEDEKFHELPLKHSRQLGYTDKSTQFEEVSPHHAGFQKTVATVNEGNLCKSQGGESSDADMFGEESNFVYPVHDMDDTFTWDTKGCGGRDATNSPHSGKYFELDIPPRVFAPVETFYSFLLDQPARKKVPIGPGYQAEIPEWEGSQTGNTEPSGMSVQNHISGCADGDKLFGTSVIPMPGLTTFAHMDDIVGKGRKFCVCRDMGSVRCVCQHIKEAREDLVKTFGNETFKGLGLCDMGEEVARNWSDEDAQLFHEVVYSNPVTLGRNFWKHLEAAFCSRTQKEIVSFYFNVFVLGRRAIQNRAFILDIDSDDDEWHGCYGGSSGFPYVEEDEEDSAIESPLHQGTEKVYPLHHEEDEEDANNSGNDEDDAYVDTRESGTGLYDEHTMNSTVEYMDRFSGNNGERLNLEDDSCTSFELAHDASIRRSVMIQWTDTKVWADSSCLNVSTNGKDLQPTRRIMEENIW

SEQ ID NO: 47 - DNA, 1482 bp, Arabidopsis thaliana
atgggattcaaacgcccttttgaagatgagaagtttcatgagctcccactcaaacattccagacaacttgactataacgataagtctactcagtttgaagaagttagtcctcaccatgctggtttccagaaaactgttgccacggtgaatgagggaaatctttgtaagtcacaaggcggtgagtcatctgaaggtgatatgtttgatgaagagtccaattatgtttaccctggtcatgacatggatgatacttttacatgggatacacaaggttgtggtggaagagatgcaacttactctccccattctggaaagtattttgagctagatatacctccaagagtatttgctcctgttgagactttctattatttactcttggatcaacgtgccaaaaagcaagtgcccattggaccaggtcatcaagccgagattcctgaatgggaaggcagtcagactgggaacatagaaacctcaggcatgtcagttcaaaatcacattagtggatgtgctgatggtgagaagctgtttggtacatctgttattcccatgcctggtttgactacagttgcacatattgatgacatagtagggaagggtagaaagttttgtgtatgccgggacagggattctgtcaggtgtgtgtgccagcacattaaagaagctagagaagaattagttaagacgtttggaaatgagacattcaaagaactgggtttatgtgagatgggggaaaaaggtgcactgaagtggagcgatgaagatgcacaactttttcatgaggttgtttattccaatcctgtaacattggggcagaatttttggaggcacttggaagctgcattttgttcccgaactcagaaagagattgttagcttctactttaacgtatttgtcctcagaaggagagccatccagaacagagcttttatattggacattgatagtgatgatgatgaatggcatggatgttatggaggctcttctggtactcgttatgtagaagaagatgaagaagactctgcaatcgagtctcctcttcatcaagggactaagaaagtgtatccactccatcatgaagaaggtgaagaagatgttagtcatagcagcaatgatgaagatgatgatgatactaaagaaggtggcactggactgtatgacgagcacaagatgagttcaacagttgaatacatggatagattttctgggaacaatggagagagattgaacgtggaagatgactcgtgcacttcctttgaacttgcacgtaatgcagtcaactgtgcagagaaagatgagactgttcctggagagcagcagaagaagttgaaggattgtaatgatccaatagataccaaagtctgggatgcttcgaggtgtttgaatgttccaacaaatggcaaagatcttcaaccaacccggagaatcatggaggagatatttggtaatggatgctgggaaaacaaggcaagaaacaagtga

SEQ ID NO: 48 - protein, 493 aa, Arabidopsis thaliana
MGFKRPFEDEKFHELPLKHSRQLDYNDKSTQFEEVSPHHAGFQKTVATVNEGNLCKSQGGESSEGDMFDEESNYVYPGHDMDDTFTWDTQGCGGRDATYSPHSGKYFELDIPPRVFAPVETFYYLLLDQRAKKQVPIGPGHQAEIPEWEGSQTGNIETSGMSVQNHISGCADGEKLFGTSVIPMPGLTTVAHIDDIVGKGRKFCVCRDRDSVRCVCQHIKEAREELVKTFGNETFKELGLCEMGEKGALKWSDEDAQLFHEVVYSNPVTLGQNFWRHLEAAFCSRTQKEIVSFYFNVFVLRRRAIQNRAFILDIDSDDDEWHGCYGGSSGTRYVEEDEEDSAIESPLHQGTKKVYPLHHEEGEEDVSHSSNDEDDDDTKEGGTGLYDEHKMSSTVEYMDRFSGNNGERLNVEDDSCTSFELARNAVNCAEKDETVPGEQQKKLKDCNDPIDTKVWDASRCLNVPTNGKDLQPTRRIMEEIFGNGCWENKARNK

SEQ ID NO: 49 - DNA, 1641 bp, Arabidopsis thaliana
atgtacagtggaactgtgaagagggtatcaccactgcaagatattaaactgcgtgtgcagattacagtttctttggaaatggaggataatgatccgaataaagaatatttgtatgctaaaggcttaagtgaatttgttacttggctaaatgctgataagaaaccgcttcacgatgtgctgggatttagaaaagagataaatggtaccaccataaacattgcgcttcaatggtgcgtagatggatattcaaacaaaattctgggatacgccaatggcatccgcaccatggatggtggaacatacatagatggtgtgaaagcgtcaataacaagaactctgaacagccttgtggagaagtcgaagcttgttgaggacaaggatattatctttactgaggagcatgttatggaaggactgacttgcattgtctcagtcattgttccaaaacctgagtttgaaggtcaaacacagagattaggaaatccaaatgtcagggaaattgttgaccaatcagtccaggagtgcttaatggagtcttttgaattgcatccagatgtattcgagagcattatgtccaaatcctataacgcttacaagactgatttggctgtcaagagggcaagggatgtgtatagttcagaaagtgtagcaatggtgtgtgccattgagtccattcctatgaaactgaccaactcttcttctgaaacatctgaaacttttataggtagaggagtttcttctggtggtgctgcaaaacacgactctgacaggtgtttcaagaacaaaaggacatgggaacagccttggagtgatgatgcagtctctacagctccaggagagtcttcagagaatactagtggttcaagttttgagaagaaaagcaagaaacccaagtcttctgtttcgtcctcgcatctctgtttttcttcacgacaatctgctgatgatgcaaactcaccaagccctaaagatgttagcaacaagactcccaaagatgtaacccatgggtccaataaagatgttagcaacaagacgtccaaagatgtaataacccatgggtccaataaaacaagaccagctatcccgatcggtccaaggttccaagctgaaataccggtttggattgcccctaccaagaagggaaaattctacggtagccctggagattccaatactctaagatggcttggaactggtgtttggccaacatatagcctaaagaagacagttcactccaaaaaagttggcgaaggaagatccgactcttgttcttgtgcttctccgaggtcaaccaattgcataaaacgacacaagaaagaagcacaggagcttttggaaaaggaaattaaccgtgctttctctacatgggaatttgatcaaatgggtgaagaaatagtgttaaagtcgtggacggccaaagaagagcgaaggtttgaagctcttgtgaaaaagaatcctttgtcaagtagtgatggattttgggaatttgcttctaatgccttcccccaaaaaagtaagaaggatctgctcagttactactacaatgttttcctcatcaaacgcatgagattgcttaagtcttccgctgctaacaatatcgatagcgatgatgaccactatgacgatttcttagcaggatga

SEQ ID NO: 50 - protein, 546 aa, Arabidopsis thaliana
MYSGTVKRVSPLQDIKLRVQITVSLEMEDNDPNKEYLYAKGLSEFVTWLNADKKPLHDVLGFRKEINGTTINIALQWCVDGYSNKILGYANGIRTMDGGTYIDGVKASITRTLNSLVEKSKLVEDKDIIFTEEHVMEGLTCIVSVIVPKPEFEGQTQRLGNPNVREIVDQSVQECLMESFELHPDVFESIMSKSYNAYKTDLAVKRARDVYSSESVAMVCAIESIPMKLTNSSSETSETFIGRGVSSGGAAKHDSDRCFKNKRTWEQPWSDDAVSTAPGESSENTSGSSFEKKSKKPKSSVSSSHLCFSSRQSADDANSPSPKDVSNKTPKDVTHGSNKDVSNKTSKDVITHGSNKTRPAIPIGPRFQAEIPVWIAPTKKGKFYGSPGDSNTLRWLGTGVWPTYSLKKTVHSKKVGEGRSDSCSCASPRSTNCIKRHKKEAQELLEKEINRAFSTWEFDQMGEEIVLKSWTAKEERRFEALVKKNPLSSSDGFWEFASNAFPQKSKKDLLSYYYNVFLIKRMRLLKSSAANNIDSDDDHYDDFLAG

SEQ ID NO: 51 - DNA, 588 bp, Brassica oleracea
atgttggcgccaagaccctcaaaggtgtatccacttggctctaacaaaaccaaaccagtcatcccagtcggtcctggtttccaggctgaaattcctatttggattgcgtctaccaagaaggggaagttttacggtagtcccggagattccgacactcttaggtggattggaacggctgtttggccaacatatagcctaaagaagaaagatcaccacaaaaaagtcggtgaagggagaccagactcttgctcttgtgctaatccaggatcagttgattgcgcgaagctacacattaaagaagcaagggagcttctagaaaaggaaactgacgatgctttctatacttggaagtttgatgaaatgggtgaggtgggatcaaaatcatggacggccaaggaagagcaaaagtttgaatctcttgtgaaaaaaattcctttgtctagttgtgatgggttttggaagtatgcttcaaaggctttcccaaggagaagtgagaaggatctcattagttactactataatgttttcctcaaccaccgtaataccgacgatgaccactgtggtgacttcttagcggatcacaggtaa

SEQ ID NO: 52 - protein, 195 aa, Brassica oleracea
MLAPRPSKVYPLGSNKTKPVIPVGPGFQAEIPIWIASTKKGKFYGSPGDSDTLRWIGTAVWPTYSLKKKDHHKKVGEGRPDSCSCANPGSVDCAKLHIKEARELLEKETDDAFYTWKFDEMGEVGSKSWTAKEEQKFESLVKKIPLSSCDGFWKYASKAFPRRSEKDLISYYYNVFLNHRNTDDDHCGDFLADHR

SEQ ID NO: 53 - DNA, 1569 bp, Glycine max
atggtgcagaagcgttcttttgatgctgaggaaatacttgaggggtctttcaaacacccaaaacatgcaggaccaagcactgagcttttttcattatcagaatctgttttccccgatgatgattgccattcccgtatgccaaaaacttcagaggatggatgtacacaatgtagtagtgaaggtattgagaagcttggaggtgaaagttttggtgaacttcctacaggggctgggaactctgaaacaagctttcctgtaatagatattcctgcttcttcttgggccaccagtggcacaattgaagatctccacctagaaccacctttacatctgtccctttttccggagtattttagtccagagcggccgataaggacattaacccgctatgaggacatctactccatactccttgaacactctccccgtaaacctgtatctgttggatctgatcatcaagctgatgttccagcatgggatattttgggtgccactaataggccaaatgcctctgatgctgtttcagtttcagactttactgttgggcacattgacgaaactgaaaaaagactgatggggacctgtgtaatccctatgcctcagatggaattgtctagcaatgatgatgaagttggaaaggcaagtactgactgtagctgtgaagaccagggttccatgagatgtgtcagacaacatattgctgaagaaagagaaaaacatataaaaacatttggggttgagaaattcactgaattgggattcactaacatgggagaacaagtggcagaaaattggagtgctgaggatgaacagctatttcacgaggttgttttcaataatccagtatcccttgacaagaacttctggaactatctttccattgcttttccttcacgaaccaaaaaggaaatagtgagttactactttaatgtcttcatgcttcaaaggagggcagagcagaacaggaacgacctgttaagcattgacagtgataatgatgaatggcaaggtagtgagggcaatgatattgcaactcgagaggaagacgaggactctgttgctgagtcccctgtatgtcatgatgagacttgtatggctgactgccacaataatgatctgcaagcctataatgagtatgccgctgatgaaacttgcgcagctaatgaaacagtggattttaccaataagaacatagatgatgattcccaatacgatcctatagagatgcatcattctagtggttcccctctaattcaaccccaggatcagcctatttggcaggattcatgtgatggaaaagttaaagaagattcatgcacatcatcagatgtaggagttgcctcacaggagactaaggtgaatactgagaatggtgatcattggtgtggtaactataatggggtaaacaatggttatagccaaggatatgttttggagcattgtgatgcaaaagtgtgggattctggatttgtatcatgctctaaaaataagattgacttcgtacctacatgcaacatgatagaagaggtttttggtgatggacgaaggcaagacattagaagagcttga

SEQ ID NO: 54 - protein, 522 aa, Glycine max
MVQKRSFDAEEILEGSFKHPKHAGPSTELFSLSESVFPDDDCHSRMPKTSEDGCTQCSSEGIEKLGGESFGELPTGAGNSETSFPVIDIPASSWATSGTIEDLHLEPPLHLSLFPEYFSPERPIRTLTRYEDIYSILLEHSPRKPVSVGSDHQADVPAWDILGATNRPNASDAVSVSDFTVGHIDETEKRLMGTCVIPMPQMELSSNDDEVGKASTDCSCEDQGSMRCVRQHIAEEREKHIKTFGVEKFTELGFTNMGEQVAENWSAEDEQLFHEVVFNNPVSLDKNFWNYLSIAFPSRTKKEIVSYYFNVFMLQRRAEQNRNDLLSIDSDNDEWQGSEGNDIATREEDEDSVAESPVCHDETCMADCHNNDLQAYNEYAADETCAANETVDFTNKNIDDDSQYDPIEMHHSSGSPLIQPQDQPIWQDSCDGKVKEDSCTSSDVGVASQETKVNTENGDHWCGNYNGVNNGYSQGYVLEHCDAKVWDSGFVSCSKNKIDFVPTCNMIEEVFGDGRRQDIRRA

SEQ ID NO: 55 - DNA, 1569 bp, Glycine max
atggtgcagaagcgttcttttgatgctgaggaaatacttgaggggtctttcaaacactcaaaacatgcaggaccaagcactgagcttttttcattatcagaatctgtttttcctgatgatgattgccatttacatatgccaaaaacttcagaggatggatgtacacaatgtagtagtgaaggtattgagaagcttggaggtgaaagttttggtgaacttcctacaggggctgggaactctgaaacaagcttccctgtaatagatattcctgcttcttcttgggctaccagtagcacaactcaagatctccacttagaaccacctttacatctttccctttttccggagtattttagtccagagcgaccgataaggacattaacccgctatgaggacatctattccatactccttgaacactctcctcgtaaacctgtatctgttggacctgatcatcaagctgatgttccagcatgggatatttcgggtgccactaataggccaaatgcctctgatgctgtttcagtttcagactttactgtaggggacattgacggaactgagaaaagactgatggggacctgtgtaatccctatgcctcagatggaattgtctagcaatgatgatgaagttggaaaggggagaactgactgtagctgtgaagaccagggatccatgagatgtgtcagacaacatatcgctgaagaaagagaaaaactcagaaaattatttgggcctaagaaattcactgaattgggtttcactaacatgggagaacaagtggcagaaagttggagtgctgaggatgaacagctatttcacgaggttgttttcaataatccagtatcccttgacaagaacttctggaactatctttccattgtttttccttcactaaccaaaaaggaaatagtgagttactactttaatgtcttcatgcttcgaaggagggcagagcagaacaggaatgacctgttaagcattgacagtgatagtgatgaatggcaaggtagtgagggcaatgatattgcaactcgagaggaagacgaggactctgttgctgagtcccctgtatgtcatgatgagacttctatggctgactgccacaataatggtctgcaagcctataatgagtatgctgctggcgaaacttgtccagctaatgaaacagtagattgtaccaataggaacatagatgatgattccaaatatgatcctgtagagatgcatcactctaggtgttcccctcctctaattcaatcccaggatcagcctgtttggcaggattcatgtgatgaaaaagttaaagatgattcatgcacatcatcagacataggagttgtctcacaggagactaaggttaccgagaatggtgatcattggtgtggtaactataatggggtaaccaatggttatagccaaggatatgttttagagcattgtgatgcaaaagtgtgggattctggatttgtatcatgctctaaaaataagattgacttcttacctacatgcaacatgatagaagaggtttttggtgatggacgaaggcaagacatgagaagagcttga

SEQ ID NO: 56 - protein, 522 aa, Glycine max
MVQKRSFDAEEILEGSFKHSKHAGPSTELFSLSESVFPDDDCHLHMPKTSEDGCTQCSSEGIEKLGGESFGELPTGAGNSETSFPVIDIPASSWATSSTTQDLHLEPPLHLSLFPEYFSPERPIRTLTRYEDIYSILLEHSPRKPVSVGPDHQADVPAWDISGATNRPNASDAVSVSDFTVGDIDGTEKRLMGTCVIPMPQMELSSNDDEVGKGRTDCSCEDQGSMRCVRQHIAEEREKLRKLFGPKKFTELGFTNMGEQVAESWSAEDEQLFHEVVFNNPVSLDKNFWNYLSIVFPSLTKKEIVSYYFNVFMLRRRAEQNRNDLLSIDSDSDEWQGSEGNDIATREEDEDSVAESPVCHDETSMADCHNNGLQAYNEYAAGETCPANETVDCTNRNIDDDSKYDPVEMHHSRCSPPLIQSQDQPVWQDSCDEKVKDDSCTSSDIGVVSQETKVTENGDHWCGNYNGVTNGYSQGYVLEHCDAKVWDSGFVSCSKNKIDFLPTCNMIEEVFGDGRRQDMRRA

SEQ ID NO: 57 - DNA, 543 bp, Helianthus petiolaris
  misc_feature (385)..(385): n is a, c, g, or t
  misc_feature (493)..(493): n is a, c, g, or t
atgaagaaacaaaagcaggttaagaagacagactggttcaatgacatgcttaatgacgatcaaaaatacgcaatccctatcggaccgcggtttcaggctgaagtgccagagtggaaagggccacctcaacgaaaataccctcacaaaactttcgacccgtcaaaatggttaggcactgtaatttggtcaaacaaagatacgacaaccagagaaaccgaaaaggatttaattggtaaagggagaccttcccgttgtgattgtcacaacccggggtctattctgtgcgttaagcgccacatcactgagaaaacagcctgtcttcagaaagaacaggggcctgcttttcaaatttggaagtttgatgagatgggagaagttgtcgcanagcgatggaaacagtccgagcagcagaagtttatgcgcattgtcaaaacggatatgatttcaggaggtaacaacttgataagactttcattggaatcttttccagcanagtcatataatacgatagtcaactattacttcactgtatacgttccctag

SEQ ID NO: 58 - protein, 180 aa, Helianthus petiolaris
  misc_feature (129)..(129): Xaa can be any naturally occurring amino acid
  misc_feature (165)..(165): Xaa can be any naturally occurring amino acid
MKKQKQVKKTDWFNDMLNDDQKYAIPIGPRFQAEVPEWKGPPQRKYPHKTFDPSKWLGTVIWSNKDTTTRETEKDLIGKGRPSRCDCHNPGSILCVKRHITEKTACLQKEQGPAFQIWKFDEMGEVVAXRWKQSEQQKFMRIVKTDMISGGNNLIRLSLESFPAXSYNTIVNYYFTVYVP

SEQ ID NO: 59 - DNA, 717 bp, Lactuca sativa
atggtacagaaacgtcaattggttgaagaggagtatgatgtttcaccaaaacacttgaaattggaaaatagtttccagttagtttcatctttggaatttccttcaaaagatgtgcctctaaaaccttgcaattcagtcatagctgatgaacaaatttctcataatgagaatgatgttgtgaagtcagaagcaccaattcagcctgtggatacgtattctcatcttttacacattcctccactgaaacaagtccctgttggaccacaatatcaagcagacattccagaatggcatggatttgatccaaacaacgcctccaaaacatcaaacgagaacaagttcatcggttcatgcgtcatccaaatgcccgaatcagatccacctatctgcaatggggttggaagaagccattgttggtgtgaagatccggggtctgttacttgtgtccgattacacatcatagaagcgagagagaacctgagggaaaacatcggccatgaacgattctcaaagctcagattctgtaacatgggggacatggtggcatgcaagtggaccgaagaagacgaacatttatttcacgaggtggtgtactcgaatcctgtatcattagggcaaaacttctggaatcatttggcggatgcgttcccttcacgcaccaacagggaaatcgttagctattattttcaatgtgtttgtgctacaaaggagagctga

SEQ ID NO: 60 - protein, 238 aa, Lactuca sativa
MVQKRQLVEEEYDVSPKHLKLENSFQLVSSLEFPSKDVPLKPCNSVIADEQISHNENDVVKSEAPIQPVDTYSHLLHIPPLKQVPVGPQYQADIPEWHGFDPNNASKTSNENKFIGSCVIQMPESDPPICNGVGRSHCWCEDPGSVTCVRLHIIEARENLRENIGHERFSKLRFCNMGDMVACKWTEEDEHLFHEVVYSNPVSLGQNFWNHLADAFPSRTNREIVSYYFQCVCATKES

SEQ ID NO: 61 - DNA, 435 bp, Malus x domectica
atgcgaacgtggcccattaaaggaaaaagtgcaagaaccacagtgaaagcacttgggaaagggaggtccaactcttgttcttgcatatctccaggatctgttggttgtgttaaactccacattcatgaacaaagactcctcttgcaattcgaacttggtcctgccttccggagttggaagtttgacgaaatgggagaatttgtctcaaagtcatggacatcaactgaacagcagaactttgaatctcttgtgaaagtgaatccactatcaaatgaagcaagtttttggaagaccgcctataagcgtttcccttccaagtctcggaagagcattttgaattattactataacgtgtacatccctaagcgtatgaccctccagaccagatcctcctgcgataaaattgacagcgacgatgatgaggcagaagagtaa

SEQ ID NO: 62 - protein, 144 aa, Malus x domectica
MRTWPIKGKSARTTVKALGKGRSNSCSCISPGSVGCVKLHIHEQRLLLQFELGPAFRSWKFDEMGEFVSKSWTSTEQQNFESLVKVNPLSNEASFWKTAYKRFPSKSRKSILNYYYNVYIPKRMTLQTRSSCDKIDSDDDEAEE

SEQ ID NO: 63 - DNA, 1212 bp, Oryza sativa
atggtcgggatgtaccagcagcagctcgtcgaagatcccttccccctgagcggcggctactgcagtgaccagccacggcacgcgcccgcctccgcctccacctccacctccacatcctcgtcagctgccgttgcagcctcgccgctggcgcaggcgcatggagccggcgagccacggcggctgttcgaggcgttcatgggggagatcctgctcccgctccgcggcgagggaggtgccaacggcggcggcgtcggccgcggtcccggcggggttggggatctgggggagttgctgcggtggacgcgggaggtcgccgcgaatcccgtggcggcgcggcctgttccggcggaggtcaaggcgaggaagcggcaggtgctggccttacggcgcgctcgctacctcaggatggaggacgttgcgaacgcggacgagctacccagcttcttcaagaaaaggaagtacagatctcacaataaccatgcagaaagacaaaaaggtaaaggttcgatgaatatgccaacaaggaaatcagagaggctagctaagagaatgaaactcatgacatcagtgctcctcacacaaaggaaaaagattggagttggtgagcattttcaggcagaggtacctgactggactgaaccaccttcagatgaacttgctcgttacaaaaatgacccaaacatctcaaagatgctaggaaccagaatttggccacctgaaggtcaagttctacaaactgataaaaaaatagctggccagggaaggatggaatcatgtaactgttcatacccgggatccttcttctgcagacagcatcacacagatgcagccagagatcagctaaggtgtgaactcggtagagctttcacagaatggcgatttgattcaatgggtgaggaggtttctaaaatgtggactcgtgaggagcaactaaagtttaatgcacttgagaggttggtccctgtgatggaccataagactttttgggcggtagcatcaaaacatcttgcctcaaagaccaggatagagttggtgcgttattacttgaacgttttcttgatgagaagagtattgagccaatgcagattaaatcttttggagattgatagtgatgaagatgaaacagaggaagaggaggatgaagatcaatctgaaagcaccagtacttcccagaggacccagcatgcccagaatgtgaagagcatttcatga

SEQ ID NO: 64 - protein, 403 aa, Oryza sativa
MVGMYQQQLVEDPFPLSGGYCSDQPRHAPASASTSTSTSSSAAVAASPLAQAHGAGEPRRLFEAFMGEILLPLRGEGGANGGGVGRGPGGVGDLGELLRWTREVAANPVAARPVPAEVKARKRQVLALRRARYLRMEDVANADELPSFFKKRKYRSHNNHAERQKGKGSMNMPTRKSERLAKRMKLMTSVLLTQRKKIGVGEHFQAEVPDWTEPPSDELARYKNDPNISKMLGTRIWPPEGQVLQTDKKIAGQGRMESCNCSYPGSFFCRQHHTDAARDQLRCELGRAFTEWRFDSMGEEVSKMWTREEQLKFNALERLVPVMDHKTFWAVASKHLASKTRIELVRYYLNVFLMRRVLSQCRLNLLEIDSDEDETEEEEDEDQSESTSTSQRTQHAQNVKSIS

SEQ ID NO: 65 - DNA, 2949 bp, Physcomitrella patens
atggcgaggcccttgggtgacatgaagaacaagcgaaaggaggtggaggcggaggaatcgggggaagtggagttgggaggtggcgagaagcggagtaagctaactgcttctgaggattttgatgtgggagagagcgatgaagacgaggatagcaggatgggtgtcttgttgttgaacacagccagtaggattttggaagccagaagacgcacgcggccattgcctgtgctcatgggggacaaggctgtcgatctcctagccctgcattctcgagtgagcagcatggggggttacagcaaggtgaccgaggccgggctctggggtgcagtttcggatgcattagaattagggctagactgcgggccagggttgaagctcgtgtatgtgaaatatttaaaagcgttggatgctgtgaaaaattccaaggagttgaagaatagctccagtttggatgcagctcagccgagcagctcagtgagagtcagtgagtggtgggaccacgggccagcaagtagacaagcagaatctgggcacgaaatgcatgaagatagggaatacgcgcccgaagaggcgacagcagggcaccaatttatttcgcactatgaccatgaccagaagatagaaaatggcagtgggagtggtaatgtaggggctgcaattttagatgatgctattgaagatctacgatgtaggtatttaacccagatggagtgtaagcaatcctcaacagttgaagaccaggaaactgaatacacctcagttaaaccccttgctagtgacactgttctcaggggagacaaagatcatgctcatacgtttgatgaaggtccaggtatgtgcggggattggtatggggggggcagagtggacaatgccatgctgcagcgggaggccttgcgtgggatggtggagtggatcaagcgaattgccatcattccaggaaggccggcatcagcaccggacgcaggaggtccaggtcaaggcgaggattggatgagccattgtcaactgctgacatcgaaagtacggactgccctttggaaggaggctcggtgtgaagatagctccgtgcagacaaaatcaaatcctacccttcgctacaacgggcccgtacgaactaggcttgtaagccaactggaacgtatgcaatcaacgaaggttgatgatcggaatactgcatgcacctcagttgaaccccttgccagcgacactattctcgagggagataaatctcattctcatacatttgatgaaggtccaggcacgagcggggattggcatgaggggggtggagtggagagtgctttgcagcagcgggtggccttgcatgggatggtggagtggatcaagcgaattgccattatcccgggaaacccagcatcagcactggacgcaggaagtccaggtcaaggcgaggattggatgagccaatgtcaaatgctgacatcgaaagtgcggactgctctttggaggaaggctcggtgtgaagatagctccatacagacaaagtcaatgccttcccaatttttcgacgagccagtccgaccggacgctcaggctcttgaacgtttacgagccactcgagaacgattagctcattatgggtttctgccacccccgggaccgagttgcaaggaaggagcatcctcaaatcaggacacgaatattgcctcgtattggggaacatcaggagctcatgttggacagcgctctgccagacattcagttaactatagcgatcctgtatttgttcggtataatcaacaaaggaaaaggattcctattggcaaagattatcaagctgacttggttagtcggattccacgagatctttcgcataagactagtgatgcaacccaagatgattctggagaaggactttatagcagcaacgctgaagacaacgacgataggtggcttggtttacagctatggcctcaggctgatctgagggaagtccactttagttcatgcgaagtaggcaggggtaggccagcttcttgcgattgtcgtgagcctggttccataaactgtgtgagaatgcatattgcggcggcaagggtaaagcttaggaatgatcttgggcatgcttttaatcgtatggggtttgatcagatgggcgagtgtgttggcgatctgtggagcaaggacgaagagcgtacattccgaatggttgccaggacacatccagcgtccaagagcagaaacttttgggactatctcccgaattctttaccgtacaaaactaggaaagaattaaatagctattatttcaatgtgctcgtcttgaggcggcgagcacttcagaataggctgggcgacaagattgacagtgacgatgatgaaggagaatttctaggtgaatccgatggtagtggtgatgtatctacaggttatgacgaaggtgatgaggatgatttcagtgacggtgcggatgatggtgaaagtggagacatgcatgatgtctacccattgaaaattctagacgatgcggggatgcagaaattcacgcgtcttcctgaatatcaattcagtcctgcggatggggtggtccatcatgaaggcgatagagcccgaactgaatcattggttgtggatctagaagagacaggcagccacggcacacacaaccattctgatccctctcatgtcatgttagattgggatgacaagcacctggagtcagcgagtttagtgcctgaaggaaggcattgggaggagcgtcattgggatggtggggatcaccagcaggtgagctctgttctcggtgaggctgtgtccaatagacggttgtccccactcgcggggaaggaagatactcaacaacccattggtcttggggatttatggaaccaaaatatggagatggccccaaagcaggagaaggataggctcctctccacgaatgggatgatcctagaactctttggtgatgatgtaagaaactaa

SEQ ID NO: 66 - protein, 982 aa, Physcomitrella patens
MARPLGDMKNKRKEVEAEESGEVELGGGEKRSKLTASEDFDVGESDEDEDSRMGVLLLNTASRILEARRRTRPLPVLMGDKAVDLLALHSRVSSMGGYSKVTEAGLWGAVSDALELGLDCGPGLKLVYVKYLKALDAVKNSKELKNSSSLDAAQPSSSVRVSEWWDHGPASRQAESGHEMHEDREYAPEEATAGHQFISHYDHDQKIENGSGSGNVGAAILDDAIEDLRCRYLTQMECKQSSTVEDQETEYTSVKPLASDTVLRGDKDHAHTFDEGPGMCGDWYGGGRVDNAMLQREALRGMVEWIKRIAIIPGRPASAPDAGGPGQGEDWMSHCQLLTSKVRTALWKEARCEDSSVQTKSNPTLRYNGPVRTRLVSQLERMQSTKVDDRNTACTSVEPLASDTILEGDKSHSHTFDEGPGTSGDWHEGGGVESALQQRVALHGMVEWIKRIAIIPGNPASALDAGSPGQGEDWMSQCQMLTSKVRTALWRKARCEDSSIQTKSMPSQFFDEPVRPDAQALERLRATRERLAHYGFLPPPGPSCKEGASSNQDTNIASYWGTSGAHVGQRSARHSVNYSDPVFVRYNQQRKRIPIGKDYQADLVSRIPRDLSHKTSDATQDDSGEGLYSSNAEDNDDRWLGLQLWPQADLREVHFSSCEVGRGRPASCDCREPGSINCVRMHIAAARVKLRNDLGHAFNRMGFDQMGECVGDLWSKDEERTFRMVARTHPASKSRNFWDYLPNSLPYKTRKELNSYYFNVLVLRRRALQNRLGDKIDSDDDEGEFLGESDGSGDVSTGYDEGDEDDFSDGADDGESGDMHDVYPLKILDDAGMQKFTRLPEYQFSPADGVVHHEGDRARTESLVVDLEETGSHGTHNHSDPSHVMLDWDDKHLESASLVPEGRHWEERHWDGGDHQQVSSVLGEAVSNRRLSPLAGKEDTQQPIGLGDLWNQNMEMAPKQEKDRLLSTNGMILELFGDDVRN

SEQ ID NO: 67 - DNA, 2535 bp, Physcomitrella patens
atggcgaggcccccgtcggatatgaagaataagcggaaggaggtggaggtggaggacgccggggaagtggagtccggaggggccgagaagcgaagtaagcctaatgctttgattgagctcggtgggcgggagagggatgaagatgagactagcagtagtgggggttcgttgttgaacaccgttcaaaggattttggaagctaggaaacgcttccggccattgcctgtgctcatgggcgacaaggttgtggatctctcagcgctgcattctcgagtgaatagtatggggggatacagtaaggtgaccgaggctgggatgtggagtgtgatttcggatgctttaggattagggctagaatgcggaccagggttgaagctggtgtatgtgaaatatttgaaagcattggaggctgataagtatgttaaagtggtgaagagcatatccagtttggatgtggctcaacccagcagttcagtgcgacccattggatgctgggagtctgggccaacgagccgagttgcggaaccagggtgtgaaatgcagggaaatggggataatggggactatttgcctgaggactcgatcgagggtcatacagttactccgcagcttgcccatggacagcggaaagaaagtgacagcgggagtgataatgctggggcggcaatatcagatgaagatgccattggggatctacgagttagacatgaaaatcagctggaatgtagacaatcactcacgagtgaggattgggcaactacgtatgcctcaggtgaacatcttgctaggaactcctatgacaggggagatcaagctcaggcgcttagatctgatgatgttccaggtgcgagcgaggattggtatgagggagagagagaagaaaatatcctccatcagcgggaggccttgtttgggatgttggagtggataaagcgaattgccatgattccagggaaccccccagcagcgctggaaacagatagttcagggaaaaatgacgattgggtgagtcaatgccaaatgctgacagccaaagtgcgctctgtcctttggaaggagcctcgggctggagatagctccatacaggcaaagccaatgccttccctgtattacgatgagccagttcgaccggatgcccaggctcttgagcgtttacgagctactcgagagcgactggctcattatgggttccagccaggcctgggatctaattgtagaggaggaacgtcctcgaatcaggacaggaacgatgcatcctactggggagcatcgggggctcatgtcggacagcgctcaggcaggcactcggtgaactatagtgaatcggcattcgctcgttataaccaacaacggaaaaaaattccaattggcccggattttcaagcggacatggatcgttgggtcccacgagaactcttgcacaggagtggtgatactactcaagatgagtctggagaaggacctagtagcagcgatgaggaggataacgacgatagatggcttggttcacaagtatggcctcagccctgcagagggggaatagacactccattgagggtaggcaaaggacggccagcatcttgcgattgtcatgagcctggttctatgaattgtgtgagattgcatatcactgcggcgagggctaaacttaggtgtgatcttgggcaagcttttaatcggatggggtttgatcagatgggagagtgtgttgccgatcaatggagtaaggatgacgaacacacgttccgaatgattgccaggacacatccagcgtctaagggcagaaatttttgggactatctcccgaatgcccttccttttaaaacgaggatggaattgaatagctattacttcaacgtgtttgtgttgaggcggcgagctcttcaaaacagactgggcgataaaattgacagtgacgatgatgaaggagaattaggcggtgaatccgacgatagtgtttacgcatccacagacgatgacgaagaggatgaggaggtgtatgatcttagcgacggggcggatgatggtggaagtgaaggcataccggacgcttatcctctgaaagttctagatgatgtagagatgcggaaattcagaaatgttccagattatcccttcagtgccgcggagggggtggtccatcatggaggtgatagagtccgaacaggctcgttagttgtggatctggaagatgtagtcaactattgtacacacgaccatgctgattcctcacatgttgtgttagtgtgggatgacaagcacctggagtcttcgaatttagtgccgcaaggaaggcattgggaggatcctcactgggatactagggatcaccagcaggggagttctgttcttggtgaggatgtatctagtagacagttgtccccacccaccgggaaggaaggtactcaacagtcctctggacttggggacttatggacccaaaatatggagatggctccaaagcaggagaaggatagacttctctccacgaacggagtgatcctagaactcttcggtgatgatgtaagaaactaa

SEQ ID NO: 68 - protein, 844 aa, Physcomitrella patens
MARPPSDMKNKRKEVEVEDAGEVESGGAEKRSKPNALIELGGRERDEDETSSSGGSLLNTVQRILEARKRFRPLPVLMGDKVVDLSALHSRVNSMGGYSKVTEAGMWSVISDALGLGLECGPGLKLVYVKYLKALEADKYVKVVKSISSLDVAQPSSSVRPIGCWESGPTSRVAEPGCEMQGNGDNGDYLPEDSIEGHTVTPQLAHGQRKESDSGSDNAGAAISDEDAIGDLRVRHENQLECRQSLTSEDWATTYASGEHLARNSYDRGDQAQALRSDDVPGASEDWYEGEREENILHQREALFGMLEWIKRIAMIPGNPPAALETDSSGKNDDWVSQCQMLTAKVRSVLWKEPRAGDSSIQAKPMPSLYYDEPVRPDAQALERLRATRERLAHYGFQPGLGSNCRGGTSSNQDRNDASYWGASGAHVGQRSGRHSVNYSESAFARYNQQRKKIPIGPDFQADMDRWVPRELLHRSGDTTQDESGEGPSSSDEEDNDDRWLGSQVWPQPCRGGIDTPLRVGKGRPASCDCHEPGSMNCVRLHITAARAKLRCDLGQAFNRMGFDQMGECVADQWSKDDEHTFRMIARTHPASKGRNFWDYLPNALPFKTRMELNSYYFNVFVLRRRALQNRLGDKIDSDDDEGELGGESDDSVYASTDDDEEDEEVYDLSDGADDGGSEGIPDAYPLKVLDDVEMRKFRNVPDYPFSAAEGVVHHGGDRVRTGSLVVDLEDVVNYCTHDHADSSHVVLVWDDKHLESSNLVPQGRHWEDPHWDTRDHQQGSSVLGEDVSSRQLSPPTGKEGTQQSSGLGDLWTQNMEMAPKQEKDRLLSTNGVILELFGDDVRN

SEQ ID NO: 69 - DNA, 1470 bp, Populus trichocarpa
atgggatttaaacggccttttgactatgaagagtttcaggatcttccttttaagcaggcaagacaggtggactattgcaataagttgactcaattttcagaaactggcgcacatagttatatgcctctgaaacctgatatcacagatgattgtgggaacagctttgtcaaacctctgtggcatgagacatttgaaaatgacaaagtcattgaagtttcaaatttggctaaagattctgacttcagtgctccgttgtcattagtcacctgcagttccagcgatgaaaattttgggtccagaatggcagcttctcctgaatattttcagtttgagtttccacggaaaatgtccatgcctttaaaggatgcccactctttctatttggatgactttcctaggaaacaggttccacttggaccaaatcatcaagccagcattccattgtgggacaatcatataaagaaggataagctagtacagtttttcaatccaaacagttcctcattgtctgaatcagaccatcacatttataatgacaatgaagagaagctgatgggcacttgtattattccaatgcctgatacagaactgcaactgtgcagtaggtatgaggctggttgtggcagatcggactgtggctgcctggatgaaggctctttcagatgtgtgcggcagcacataatggaagcacgagaagaattaataaaatccattgggcatgaaaaatgtgtaaacttagggttttatgacatgggagaggaggtggcatgtaattggaccaaggaagaagaacgtgtttttcatgaagttgtttattccaggccagcgtccttgggccagaacttttggaagcacctggcgcaagtgtttcctgatagaaccacaaaggaaattgtcagctattacttcaatgtctttatgcttaggaaacgagctgctcaaaacagatctaacccactggacattgacagtgatgatgatgaatttcctcagatccacagaggctcccatattcaagttgtagaagaggatgaagattctgatcttgagtctcctgttgatcaatatgatcatgcgggcctggaagaggatattcttgaagatgatgacaatgatgatgatgatgtggtggtgactttgatggtgatttcggagatggtgacggagacaccacaggagaagcacatgaacaagaatgctggtagtgatgggttggatttcactgttcaagatgactcttgcatgtcttttgagttccaagccgataaagttgacccttgtgctccaggtgattccagggctgctttgcatgtatacttgttggacccgtgtgataccaaagattgggatgcacgttacttgagtccaattaggggtgttgatcttcttcctacaagtaacatcattgaagaaatatttggacatggagcctgtgaggatcggacaagagatgtcaatagcatcagctag

SEQ ID NO: 70 - protein, 489 aa, Populus trichocarpa
MGFKRPFDYEEFQDLPFKQARQVDYCNKLTQFSETGAHSYMPLKPDITDDCGNSFVKPLWHETFENDKVIEVSNLAKDSDFSAPLSLVTCSSSDENFGSRMAASPEYFQFEFPRKMSMPLKDAHSFYLDDFPRKQVPLGPNHQASIPLWDNHIKKDKLVQFFNPNSSSLSESDHHIYNDNEEKLMGTCIIPMPDTELQLCSRYEAGCGRSDCGCLDEGSFRCVRQHIMEAREELIKSIGHEKCVNLGFYDMGEEVACNWTKEEERVFHEVVYSRPASLGQNFWKHLAQVFPDRTTKEIVSYYFNVFMLRKRAAQNRSNPLDIDSDDDEFPQIHRGSHIQVVEEDEDSDLESPVDQYDHAGLEEDILEDDDNDDDDVVVTLMVISEMVTETPQEKHMNKNAGSDGLDFTVQDDSCMSFEFQADKVDPCAPGDSRAALHVYLLDPCDTKDWDARYLSPIRGVDLLPTSNIIEEIFGHGACEDRTRDVNSIS

SEQ ID NO: 71 - DNA, 1626 bp, Sorghum bicolor
atgctgcatcaggagaacagtgaggctttcgtgaggcaccactctgagcagcttgcatgtagcaacatgaggggagcagataatggtcgtccgaatttccttcctgagaaatgccagattgcagtttgccaaaggggtgaaaaagttgacctatttgatgaagagttggtacaaggtgttcatctagccaatcctactgttcattcaccattggtgccaagtggtgtcaaagaaacacctatagttgatcataacaagagacctgcatccagtgacatgctggatatagttgaatgcaaacggctgaagcaggaagatcaaattgtaactaaggaagacaaccatacatctgctgtggaggattttcgtgagtacccaacatacacgacttgtgaaagaagctttgactcaccactgtatgagagcgaggaaagtgaagatgagggtgtagattcacctctccattattcacatgctcacacctatgtggaggatgatctatggcctgccagctttcatcaatctgtgggcccttttccctcgaggaaagctgttcctattgggccaaatcatcaggctgaattacctgagtgcaggccatttagtggaaggactgaagaaggagaaagtgtcaagtggatcagaaacggtgttattccaatgcctggtactgatgcatcgtctttggtgttggaacctgttcactgcaaggcaggctgtgagtgtcttgacgaaggttcaatcaattgtgtgaaaaagcatgtgagggaagcaagagaaaagctgaagggttctgttggttcagacgccttcagagagttgggtttctatgatatgggagaagaggttgcctcaaggtggacagaagaggaggaacatttgttccagcaagtggtcttggcaaaccccgcttctctgcgtagaaacttttgggacgaactccctcttgctttcccttccaagtccagcaaagaactagtgagctactacttcaatgtcttcatgttgaggaagagggctgagcagaacaggttcgacccaatgaacatcgacagtgacgatgacgaatggcaggcaggtggtgatggtgagtttccaatcacaggaagagctgacgaatacttgccaactgagtcccttactgatcaagatgatattgcatgcaatccagttcctctagaggaggatttctatgaagattctgatgatgaggatgagcttgacaatgccagtggagacaggcataatggttgtcagagggccagcatgttgtcagagggccatcctgtaatgtcatttatagataataatcaacagacgttcaagctagatgcagatgcacaggatgactcttgcacatcatttgaggctcatcaggttggtgttgaaggtggtacacatactgatattgctgatggcagtcactacaggagtgacggctttggtggcggtgcagagcatgggttctttggtgatcattgtgacacaaaagagtgggacttcggtttcagtaccggttgggagaagcatgattttttgtcaacaaacaatgtcatagaagaggtgttcgggaagggctccagtgaagatggaagtgacactgctactggccagggccttctctga

SEQ ID NO: 72 - protein, 541 aa, Sorghum bicolor
MLHQENSEAFVRHHSEQLACSNMRGADNGRPNFLPEKCQIAVCQRGEKVDLFDEELVQGVHLANPTVHSPLVPSGVKETPIVDHNKRPASSDMLDIVECKRLKQEDQIVTKEDNHTSAVEDFREYPTYTTCERSFDSPLYESEESEDEGVDSPLHYSHAHTYVEDDLWPASFHQSVGPFPSRKAVPIGPNHQAELPECRPFSGRTEEGESVKWIRNGVIPMPGTDASSLVLEPVHCKAGCECLDEGSINCVKKHVREAREKLKGSVGSDAFRELGFYDMGEEVASRWTEEEEHLFQQVVLANPASLRRNFWDELPLAFPSKSSKELVSYYFNVFMLRKRAEQNRFDPMNIDSDDDEWQAGGDGEFPITGRADEYLPTESLTDQDDIACNPVPLEEDFYEDSDDEDELDNASGDRHNGCQRASMLSEGHPVMSFIDNNQQTFKLDADAQDDSCTSFEAHQVGVEGGTHTDIADGSHYRSDGFGGGAEHGFFGDHCDTKEWDFGFSTGWEKHDFLSTNNVIEEVFGKGSSEDGSDTATGQGLL

SEQ ID NO: 73 - DNA, 1191 bp, Sorghum bicolor
atggtggggatgtaccagcaccagctccgcgacgaccccttcggcaccctaggcggcggccactgcggtgaccagccacgcatcgccggcggcggcgcctcctcctcctcctcctcctcgttgtcctcctctccctcggctgttctcgccccgctgcctgcagaggcgcatggcggcggagagccgcggcagcggttcgaggcgctcgccgacgggggaagcgtgctgcgcggcgcgggaggcggcaaaggcggcgtcgtgggtggggatctgggggtgctagtgcggtggatgcgggagctcgcagcggatcccgtggctccccttccggcgccatcagagcacaggccgaggaagcggcacgtgctggccttgcggcgcgctcgctaccttagattggaggacgtggaggacgcagaagagcttcccagcttctacaagaaaaggaagctctactgggacaaacaaaaaaagaaagggtgcttgaacatgccaacaaggaaatctgagaggctagctaagagaatgaaactcatggcatcattgctcctcacacaacggaaaaagattggagtaggtgagcactttcaggcagaggtacctgattggactgggcaaccttcagggaaagagctttcacgttacaggagtgatccagagacatcaaagtggttagggactaggatgtggcctcctgagggtgaagtttataaaaccgacattgtagctgttgggcagggaaggcccggatcatgtagttgccccttcccaggatccttcttctgcagacagctccacataaatgaagcaagagatcagctacgctctgaacttggtcaagtttttacaatgtggcagtttgattctatgggggaggaggtttctaagttgtggagtcgcgatgagcagctaaagtttgacgcacttgagcaattggttcctgttatggatcaaaagacatattgggccgttgtgtcgaaaaattttgcttcaaagcccaggatagattcgataaagtactacctgaatgtgttcctgatgagaagagtgttgagtcagtgcagactgagtcttctggaaattgatagtgacgaagatgaagtggaggaagaggaggatgaagatcaacctgaaggatccagctctcttcagaggactcaagatgtccaggatttgaagaaggtgccatga

SEQ ID NO: 74 - protein, 396 aa, Sorghum bicolor
MVGMYQHQLRDDPFGTLGGGHCGDQPRIAGGGASSSSSSSLSSSPSAVLAPLPAEAHGGGEPRQRFEALADGGSVLRGAGGGKGGVVGGDLGVLVRWMRELAADPVAPLPAPSEHRPRKRHVLALRRARYLRLEDVEDAEELPSFYKKRKLYWDKQKKKGCLNMPTRKSERLAKRMKLMASLLLTQRKKIGVGEHFQAEVPDWTGQPSGKELSRYRSDPETSKWLGTRMWPPEGEVYKTDIVAVGQGRPGSCSCPFPGSFFCRQLHINEARDQLRSELGQVFTMWQFDSMGEEVSKLWSRDEQLKFDALEQLVPVMDQKTYWAVVSKNFASKPRIDSIKYYLNVFLMRRVLSQCRLSLLEIDSDEDEVEEEEDEDQPEGSSSLQRTQDVQDLKKVP

SEQ ID NO: 75 - DNA, 654 bp, Solanum tuberosum
atggaggtctattcccctcttttgaacaatcctcctcggaaatcggttcccattggaccagatttccaagccgaattaccagaatggggtgcatatgattgtaaaaatatatccatgaaggagagcactcaagaaagcccaaatcttccatctcaagctctagaatcaggttttgtggatcatcatgatgaagaaaataaacttgctgggacatgtatcattccaatgcctaaattggaattacctgcagaccacgaggagaatgttggagcaggaaaaattgggtgttcctgtgaagatgctggttcctttggatgtgttcggctgcacatcatggaagcaagggagaaacttaaggcggccttgggtgaggaaacatttgttaggttgggtgtttatgatatgggagagatagtggcagcgaaatggagtgatgaggaagaggaattatttcatgaagttgtattttccaatcctgcagcactaggcaagaatttctgggagcaccttgctgttgaatttccttcacggagcaagagagatctcgttagctattacttcaatgtctttattttgcggaagcgtgccaagcagaataggtttgacccatcaaatatagacagtgataacgatgaatggcagggagatcgatga

SEQ ID NO: 76 - protein, 217 aa, Solanum tuberosum
MEVYSPLLNNPPRKSVPIGPDFQAELPEWGAYDCKNISMKESTQESPNLPSQALESGFVDHHDEENKLAGTCIIPMPKLELPADHEENVGAGKIGCSCEDAGSFGCVRLHIMEAREKLKAALGEETFVRLGVYDMGEIVAAKWSDEEEELFHEVVFSNPAALGKNFWEHLAVEFPSRSKRDLVSYYFNVFILRKRAKQNRFDPSNIDSDNDEWQGDR

SEQ ID NO: 77 - DNA, 1617 bp, Triticum aestivum
atgttgcatcaagaaaatagtgaggtttatgtgaggcaccactctgagcagcttgcgtgtggcaatctgaggggaaccgatgatgggcgctcaaacttccttcctgggaaataccatattgcaacagaatggaataccacagcttgtctagttaatactgccagtgctgttaaagaagtgacagtcgatcattataagagacctgcctctagtggtttcccagacatgttggactgcaaacggatgaagcaggaagagcaaactgtatctgagaaagataatgcagcagatgctgacataaatgttccagagtatggatcatacaagacatgggagagaatctccgatccaccagcgtacggtagtgaggaaagtgaggatgaaggtgtagatccacccgttaatttttcactagcccaaacttatgttgaagattacctgcgatctgcaagttattatcaaagggaagacatttactcgtctgttagcctttgccctacaaggaaaactgttccaattgggccaaattatcaggctgagttgccagagtgtgcatctggtaattgtaggagctcagttgatggtaatgctgatgtgtcatcatcttctcacatatgtgatataaaggaagccgggagtgacaagtggattaggaactctgttattccaatgcctggttctgttgagttatcttcagtgctgaaacctgtttgctgtaagacagattgcagttgtgttgatgaaggttcgattgcgtgcgtgaggaagcatgtgaaggaagcaagagaaagactaatgagtgcccttgatctgaacaccttcaaagagttaggattctttgacatgggagaggaggtggccttgaaatggactgaagatgaagagcatttgttccaggatgtggtatcattaaaccctgcctctcttggaaggaacttctgggatgaacttctgcttgccttcccattgaagactaacaaagagttagtgagctactatttcaatgtctacatgttgaggaagagggctgagcagaataggtttgatccaatgaatgttgacagtgataatgatgaatgggagggaagagatgatgatgaatttgctgtgacagaaagggctggtgaggatttgctgctcgagtctcttactgatcaagatgatggtgcatgcaatcaagttcccctccaaggaaatatgcatgaagagtctggtgaggaggatgagtttgactgttctagtggtgacaggcaagaaaattgctgtgtggaggggaatgtcatggtgtcccttgtggacgataaccagggggcaaccatttttgacgcagatgctcaagacgactcgtgcacatcatttgaggctccgcatgtttgtaccacggatggcacacccactgatattgctggagaccactaccgggatgttggctttggtagcgttgcagatcatggatactttggtggccactgcgacccgaaaacatgggatattggtttcagtagcgtgtgggagaaagacgaatttctttcgacaaacaatgtgatagaagaggtgtttggaaagggttcttgtgaaaatggaaatgactcttctactgcccagggcatcatgtaa

SEQ ID NO: 78 - protein, 538 aa, Triticum aestivum
MLHQENSEVYVRHHSEQLACGNLRGTDDGRSNFLPGKYHIATEWNTTACLVNTASAVKEVTVDHYKRPASSGFPDMLDCKRMKQEEQTVSEKDNAADADINVPEYGSYKTWERISDPPAYGSEESEDEGVDPPVNFSLAQTYVEDYLRSASYYQREDIYSSVSLCPTRKTVPIGPNYQAELPECASGNCRSSVDGNADVSSSSHICDIKEAGSDKWIRNSVIPMPGSVELSSVLKPVCCKTDCSCVDEGSIACVRKHVKEARERLMSALDLNTFKELGFFDMGEEVALKWTEDEEHLFQDVVSLNPASLGRNFWDELLLAFPLKTNKELVSYYFNVYMLRKRAEQNRFDPMNVDSDNDEWEGRDDDEFAVTERAGEDLLLESLTDQDDGACNQVPLQGNMHEESGEEDEFDCSSGDRQENCCVEGNVMVSLVDDNQGATIFDADAQDDSCTSFEAPHVCTTDGTPTDIAGDHYRDVGFGSVADHGYFGGHCDPKTWDIGFSSVWEKDEFLSTNNVIEEVFGKGSCENGNDSSTAQGIM

SEQ ID NO: 79 - DNA, 545 bp, Taraxacum officinale
atggatactccattaccaacacaagccaagcttaatctaaaacgacacaagtcagtcgaccgattccactacatcaccaacgaaaatctaagactcgcaatcccaatcgggccccgttttcaagccgatgtacccgaatgggcgggcccacgtcacaaaacaaaaccccgctcttcaaaatggttaggccaagtcacatggtcaacgggacccacaaccacaacctcagaacccgaagtcgggaaaggaacgcccgagtcatgcaactgcgcatcacgtgggtccatcatgtgcgtgaagcgccacatcacccaaaaatcatcggacctaccaaaagacttgggacccgctttccaaaaatggaagtttgaccaaatgggagagtccgtagcctagttatggaaacaacccgagcaacaaaaactcacacatctcatgaaagaagtaccgctttcaaaagatatgcattttataaaacccgcattggaatgttttccattaagatcgaaaacagatatcgtgagctattatttaaatgtttatgt

SEQ ID NO: 80 - protein, 181 aa, Taraxacum officinale
MDTPLPTQAKLNLKRHKSVDRFHYITNENLRLAIPIGPRFQADVPEWAGPRHKTKPRSSKWLGQVTWSTGPTTTTSEPEVGKGTPESCNCASRGSIMCVKRHITQKSSDLPKDLGPAFQKWKFDQMGESVALWKQPEQQKLTHLMKEVPLSKDMHFIKPALECFPLRSKTDIVSYYLNVYV

SEQ ID NO: 81 - DNA, 717 bp, Taraxacum officinale
atgaagaaggttaaaaagagtcagaaacatcaaaaaggtgactggatcaacaacattcttgatgaaaacaaaaaactagcaatcccaattggaccgcggttccaagctgacgtggcggaatggacgggcccacctcaaagaaaatacccccacaaaaccctcactaaatcaccatcctcaaaatatttaggcaccatcatttggtcaaacaaagagtcaaccccagaaaccgaaatcgggaaaggaagacccgaaatctgtgattgccatactccaggatccatctcatgtgttaaacgccacattgctctaaaaagggcccgcttacaaaaagacgtgaggcccgctttccataaatggaagtttgatgaaatgggagaagttggtgcaaaattatggaagcattcagaccaacagaagtttattcagattgtgaaaagtaatccgatttctgaaggtaataataactttataaaacttgccttggaatcttttaaatcgaaatcatggaaaacaatagggagctattacttcaatgtgtaccttcctagacgtataagtgcaaaaattaggtcaggtggtggatctatagacacagatgatgaagaagaagataaacatattgccattaaagggtcaagaaaaaggagtcatgttgatggtgtaggtcaaccttctaaatttggaaaggtcgggtacttaagtggaagaagatga

SEQ ID NO: 82 - protein, 238 aa, Taraxacum officinale
MKKVKKSQKHQKGDWINNILDENKKLAIPIGPRFQADVAEWTGPPQRKYPHKTLTKSPSSKYLGTIIWSNKESTPETEIGKGRPEICDCHTPGSISCVKRHIALKRARLQKDVRPAFHKWKFDEMGEVGAKLWKHSDQQKFIQIVKSNPISEGNNNFIKLALESFKSKSWKTIGSYYFNVYLPRRISAKIRSGGGSIDTDDEEEDKHIAIKGSRKRSHVDGVGQPSKFGKVGYLSGRR

SEQ ID NO: 83 - DNA, 1761 bp, Vitis vinifera
atgacagagtatagcattgatatcccagtggctgcagagaaacttgagcttgacttcccagcaaccttggagaaaattgatcttgatatctcagtgttgccagagaaaaaggagcttgaaggtggcaatgtaagagggaactctgctggaaaaacaggtggagcaaatggcagagctaaggttcttcccaattatctcagttctccaactggctcctgccatgatttctgcaagtatggaacaaaacccttaaacatggtacagaagcgttcatttgatgatgaggagttatacgagatttcttctaagcaccccagacaattagaacataatcatcatctaatttcatttttggaatttgttccttttgatgatcctcttcagaagcctcgtgttcaaggtgagggagaattattaaaatgtaaaactgaaggtgatgagaagcttctcagtggcttctgtactgattttccaataagtgctaaagacactgaaacctttatgcgtggctgcatttccacctcatcatgggccaccagcagtactagtgaagatgatgccaggtcagaggcaccaattgatgtatcactgtttccagaatattttagttctgacagtccagtgagggcatccaacgactctgatgactactatttatctcttttggattatcctccccgaaaatctgtccccattggatcagatcatcaagttgatgttccagcatggagccaggcttcaggcttggaactcagtgttggtaacattgatgagaaaaggctgattgggacatgtgtaatgccaatgcccaagtcagaaccattttgcaacgatgctgtagtcggaaatggtagaactgattgtagctgtcatgataggggttcttacagatgtgtaagacaacatattgcggaagcaagagagaaacttagaggaacccttggagaggagaggtttgtaaagctgggtttccatgacatgggagaggaagttgcagagaaatggaatgaagaggaagaacaattatttcacgaggttgtcttctctaatccagtgtcattgggtaagaatttttgggacaatctttccttagtcttcccttcccgaactacaagggaaatagtcagctattattttaacgtgttcatgcttcgaaaacgggcagaacagaacagatatgacccagagaacattgacagtgataatgatgagtggccggagactgatgattattgcaatgatgaacatgaaatgacagaggaagatgaggattctgttgttgaatccccgatatatcaagaggatcctagttataatccatgtcatgcagatgataaacgaaaatatgaggatattggggatggaactcatggtgataacgagaatgtaaattatggtagtgggatggacatccttgatatttcagaatcatgcactgacaagttactaaacaattctggttctgattccatttgtcagctttcagatgttccctgggatggaaagggagaccatggcatcaaagatggctcatgcacatcctccaatacaggggctgactcacaaaggacccaagcgaaggctggcaatggtgaccactggtatgctttggagccctgtgatgctaaagtatgggatgctgggtatgtgacttgctccaaaactaaagttgatttgttatcaacttgcagtatgattgaagaggtttttggagctggtactgggacgtacaagggagcagatggtcagggcttgatttag

SEQ ID NO: 84 - protein, 586 aa, Vitis vinifera
MTEYSIDIPVAAEKLELDFPATLEKIDLDISVLPEKKELEGGNVRGNSAGKTGGANGRAKVLPNYLSSPTGSCHDFCKYGTKPLNMVQKRSFDDEELYEISSKHPRQLEHNHHLISFLEFVPFDDPLQKPRVQGEGELLKCKTEGDEKLLSGFCTDFPISAKDTETFMRGCISTSSWATSSTSEDDARSEAPIDVSLFPEYFSSDSPVRASNDSDDYYLSLLDYPPRKSVPIGSDHQVDVPAWSQASGLELSVGNIDEKRLIGTCVMPMPKSEPFCNDAVVGNGRTDCSCHDRGSYRCVRQHIAEAREKLRGTLGEERFVKLGFHDMGEEVAEKWNEEEEQLFHEVVFSNPVSLGKNFWDNLSLVFPSRTTREIVSYYFNVFMLRKRAEQNRYDPENIDSDNDEWPETDDYCNDEHEMTEEDEDSVVESPIYQEDPSYNPCHADDKRKYEDIGDGTHGDNENVNYGSGMDILDISESCTDKLLNNSGSDSICQLSDVPWDGKGDHGIKDGSCTSSNTGADSQRTQAKAGNGDHWYALEPCDAKVWDAGYVTCSKTKVDLLSTCSMIEEVFGAGTGTYKGADGQGLI

SEQ ID NO: 85 - DNA, 1593 bp, Vitis vinifera
atgggactcaaacggtcttttgaaaatgaggagtttcaggagcttccttttaagaacatgaaatgtgttgagtctagagataagctggcctcctttggagaaattgttccatgtaaagatgcccctcagaaacctgatatttcaggtagaatattgtttgttttgtcatcattaatgcttacgcctcatttactagatgacaaagggtttgagatcagcgctcccttgtcgtgcaatggttcaagtgaggaagatggtaggtctgtggcagctgcttactcatccctctctccagaatattttgaatcctacctcccacggagaacagtagcacagtttgaggatatatattcttctttgttggattgttctcctagaagacaagttcctgttggaccagatcatcaagcaaatgttccagtatggagcctgcagaaagtcaaaaacagattagataagttagagacctctaatcgctacatttcctcatcacagtggatgggaacttgtgtcattccaatgcctgaagaaaatttgtctgctgaaaatggtgtcaagactggagatggcagaacagattgtggttgcctggataatgattctatcagatgcgtgcggcaacatgtaatggaagcacgagagaaactaagaaaaacccttggacaggaaaaattcatggagttaggattttgtgacatgggagaagaggtggcacttaaatggcatgaagaagaagaacaggcttttcatgaggttgttttctcacatcccgcgtcattgggtcagaatttttgggaacatctctctgcaacattctcatatcgagccaagcaggaacttgtcagctattatttcaatgtctttatgcttcggcagcgggctgcccagaacagatccaacttcttgtacatcgacagcgatgatgatgaatggcatggaaataatagaagcttaaatgaagttggaactgcagaagaagaagatgattctggcatagaatctctttctgatcaacataatcacgcatatcatgaagaggaacctcatgaagaagatgacgacgacgatgatgacgacgatgacgatgaagaagatgatgacaaggacgacagtgattttgacggtgatggtggttttggagatgacaagcaaggtgccaccaaagaggatggcatggtgcataatgggaagttgcttgattacaacatgtttgatcctgtagctcggaacatggataaggtaccagatagcaatggggaggatttcagtgtccaagatgactcatgcatgtcttttgagtgccaacccaatgttgccaacccttgtgctccttctgatccggaggcttctgttcaagaaagtggagctaggattacccagcaaaaatcctttcatggtgacgatgatgggtccagcaccagggtagacccaggatatttattggagccctctgaaaccaaagtttgggatggcaggtactggacaggttccataaatggcgttgatctcctgcccacatgcaatatgattgaagagatttttggactaggcacaccgaatagcaagacaaaggacgacaaaagcatcagctaa

SEQ ID NO: 86 - protein, 530 aa, Vitis vinifera
MGLKRSFENEEFQELPFKNMKCVESRDKLASFGEIVPCKDAPQKPDISGRILFVLSSLMLTPHLLDDKGFEISAPLSCNGSSEEDGRSVAAAYSSLSPEYFESYLPRRTVAQFEDIYSSLLDCSPRRQVPVGPDHQANVPVWSLQKVKNRLDKLETSNRYISSSQWMGTCVIPMPEENLSAENGVKTGDGRTDCGCLDNDSIRCVRQHVMEAREKLRKTLGQEKFMELGFCDMGEEVALKWHEEEEQAFHEVVFSHPASLGQNFWEHLSATFSYRAKQELVSYYFNVFMLRQRAAQNRSNFLYIDSDDDEWHGNNRSLNEVGTAEEEDDSGIESLSDQHNHAYHEEEPHEEDDDDDDDDDDDEEDDDKDDSDFDGDGGFGDDKQGATKEDGMVHNGKLLDYNMFDPVARNMDKVPDSNGEDFSVQDDSCMSFECQPNVANPCAPSDPEASVQESGARITQQKSFHGDDDGSSTRVDPGYLLEPSETKVWDGRYWTGSINGVDLLPTCNMIEEIFGLGTPNSKTKDDKSIS

SEQ ID NO: 87 - DNA, 1167 bp, Zea mays
atggtggggatgtaccagcaccaactccgcgacgaccccttcgacaccctaagcggcggccactgcggtgagcagccacgcgttgccggcggcggcgcctcctcctcctcaccctcggctgttcatgacccgctgtctgcagaggtacatggcggcggacagccgcggcagcgggtcgaggcgcttgccgacggaagaagcatgttgcgcggcgggggaagcggtatagttggcgccgcgggtggagatctaggggtgctagtgcggtggatgcgggaactcgcagcggatcccgtgggtccacttccggcgccatcagagcacagggtgaggaagcggcacgtgctggcctggcggcgcgctcgctacctcagattggaggacgtggcggacgcagaagagcttcccagcttctccaagaaaaggaagctctactgggatcaaaaaaagaaaggctgcttgaacatgccaacaaggaaatctgagaggcttgctaagagaatgaaactcatggcatcattgctcctcacgcaacggaaaaagattggagtaggtgagcactttcaggcagaggtacctggttggactgggcaaccttcagggaaagagctttcatgttacaggaatgacccagagacatcaaagatgttagggactagaatgtggcctcctgagggtgaagtttataaaactgacattgtagctgttgggcagggaaggcctggatcatgtaattgcccctacccaggatccttcctctgcagacagctccacacaaatgaagcaagagatcagctacgctctgaacttggtcgagtttttacaatgtggcaatttgattctatgggggaggaggtttctaagctgtggagtcgtgatgagcaactaaagttcgacgcacttgagcaattggttcccgttatggatcaaaagacatattgggctgttgtgtcgaaaaattttgcttcaaagcccaggatagatttgataaagtactatctgaatgtgttcctgatgagaagagtgttgtaccagtgcagactcggtcttctggaaattgatagtgacgaagatgacgtggaggaagaagaggacgaagatcaacctgaaggatccagctctcttcagaggactcaagatgcccaagacttgaagaaggtgccatga

SEQ ID NO: 88 - protein, 388 aa, Zea mays
MVGMYQHQLRDDPFDTLSGGHCGEQPRVAGGGASSSSPSAVHDPLSAEVHGGGQPRQRVEALADGRSMLRGGGSGIVGAAGGDLGVLVRWMRELAADPVGPLPAPSEHRVRKRHVLAWRRARYLRLEDVADAEELPSFSKKRKLYWDQKKKGCLNMPTRKSERLAKRMKLMASLLLTQRKKIGVGEHFQAEVPGWTGQPSGKELSCYRNDPETSKMLGTRMWPPEGEVYKTDIVAVGQGRPGSCNCPYPGSFLCRQLHTNEARDQLRSELGRVFTMWQFDSMGEEVSKLWSRDEQLKFDALEQLVPVMDQKTYWAVVSKNFASKPRIDLIKYYLNVFLMRRVLYQCRLGLLEIDSDEDDVEEEEDEDQPEGSSSLQRTQDAQDLKKVP

SEQ ID NO: 89 - DNA, 1605 bp, Zea mays
atgctgcatcaggagaacagtgagccgttcgtgaggcaccactctgagcagcttgcgtgtggcaacatgaggggagcagataatggtcgtccgaatttccttcctgagaagtgccagattgcagtttgccagaggggtgaaaaagttagcctatttgatgaagggctgatacatggtgttgatctaaccaatcatattgctcagtcacaattggtgccaagtggtgtcaaggaaacaccaatagtggatcaaaacaagagacctgcatccagtgacatgcttgacatagttgaatgcaaacgtctgaagcaggaaggtcaaatcgtaactaaggaagacaaccatacatctgcagaggattttcatgagtaccccacatacacgacttgcagaagaagctttgactcaccactatctgagagcgaggatagtgaagatgaaggtgtagattcacctctccatttttcacatgctcacacctatgttgaagatgatctatggcctgccagctttcatcatgctctgggcccttttcccttgaggaaacctgttcctatcgggccaaatcatcaggctgaattacctgagtgcaggccattttgtggaagaactgaagaaggcgaaagtgtcaagtggatcagaaacggtgttgtgccaatgcctgatactggtgcatcgtctttggtgttggaacctgttcactgcaaggcagactgtgagtgtcatgatgaaggttcaatcatttgtgtgaaaaagcatgtgagggaagcaagagaaaagctgaagggttctgttggtgcagacaccttcagggagttgggtttgaatgatatgggtgaagaggttggctcaaggtggacagaagaggaggaacatttgttccagcaggttgtcttgtcaaaccctgcttctctgtgcagaaacttttgggatgaactccctcttgccttcccttccaagtccagcaaagaactagtgagctactacttcaatgtattcatgttgaggaagagggctgagcagaacagatttgacccagtgaacatcgacagtgatgatgacgaatggcaggcaggtgacgatggtgagtatccaatcacaggaagaactgatgaatacttgccaactgagtctcttactgatcaagatgatgttgcatgcaatccagttcctttagaaagggatctctatgaagattctgatgatgaggatgagctggacaatgccagtggagacaggcataatggtgcccagagggctggtatgttgtcagagggtaatcgtgtaatgtcggtcatagaacataatcaacagacgttcaagttagatgcagaggcgcaagacgactcttgcacatcatttgaggctcatcaggttggtgttgaaggtgggacacatactgatattgctgatgacaatcattacaggagtgacggctttggtggtggtgcagaacatgggttcttcggtaatcagtgtgacacaaaagagtgggacttcggtctcagtatcggttgggaaaagcatgattttttgtcaacaaacaatgtcatagaagaggtgttcgggaagtgctgtgacactgctgaccaggaccttatctga

SEQ ID NO: 90 - protein, 534 aa, Zea mays
MLHQENSEPFVRHHSEQLACGNMRGADNGRPNFLPEKCQIAVCQRGEKVSLFDEGLIHGVDLTNHIAQSQLVPSGVKETPIVDQNKRPASSDMLDIVECKRLKQEGQIVTKEDNHTSAEDFHEYPTYTTCRRSFDSPLSESEDSEDEGVDSPLHFSHAHTYVEDDLWPASFHHALGPFPLRKPVPIGPNHQAELPECRPFCGRTEEGESVKWIRNGVVPMPDTGASSLVLEPVHCKADCECHDEGSIICVKKHVREAREKLKGSVGADTFRELGLNDMGEEVGSRWTEEEEHLFQQVVLSNPASLCRNFWDELPLAFPSKSSKELVSYYFNVFMLRKRAEQNRFDPVNIDSDDDEWQAGDDGEYPITGRTDEYLPTESLTDQDDVACNPVPLERDLYEDSDDEDELDNASGDRHNGAQRAGMLSEGNRVMSVIEHNQQTFKLDAEAQDDSCTSFEAHQVGVEGGTHTDIADDNHYRSDGFGGGAEHGFFGNQCDTKEWDFGLSIGWEKHDFLSTNNVIEEVFGKCCDTADQDLI

SEQ ID NO: 91 - DNA, 1461 bp, Zea mays
atggtcatccgaatttccttcctgagaaatgccagattgcagtcaccatttttgccaagtggtgtcaaagaaacacctatagtggatcataacaagagacctgcatccagtgacatactggacatagttgaatgcaaacggctgaagcaggaagatcaaatcgttactaaggaagacaaccatacatctgctgaggaggaatttcatgactaccccacatacacgacttgcgaaagaagctttgactcaccactatatgagagtgaggaaagtgaagatgagggcgtagattcacctctccattgttcacatgctcgcacctatgttgaagatggtctatggcctgccagctttcatcaatctgttggccctttttccttgaggaaacctgttcctatcgggtcaaatcatcaggctgaattacctgagtgcaggccatttggtggaagaactgaagaagacgaaagtgtcaagtggatcagaaacagtgttgtgccaatgcctggtactgatgcatcgtctttggtgttggagcctgttcactgcaaagcaggttgtgattgtcttgacgaaggttcaatcaattgtgtgaaaaagcatgtgatggaagcaagagaaaatttgaaggattctgttggtgcagacgccttcagggagttgggtttctatgacatgggggaagaggttgcctcaaggtggtcagaagaggaggaacgtttgttccagcaagtggtctcgtcaaaccgtgcttctctgcgcaggaacttttgggatgaacttcctcttgccttcccttccaagtccagcaaagagctagtgagctactacttcaatgtcttcatgttgaggaagagggctgagcagaacaggttcgacccagcgaacattgacagtgacgacgatgagtggcaggcaggtggtgattttgagtttccaataacaggaagaactgatgaatacatgccaatcgagtcccttactgatcaagatgatgttgcttgcaatccatttcccttggagggggatttatatggagattctgatgatgaggacgagcttgacaattccagtggagacaggcataatggtgtgcagagggctggtatgttgtcagagggtcatcccgaaatgtcatttatagatcatgatcaacagacgttgaagctagatgcagatgcacaagatgactcttgcacatcatttgaggctcatcaggttggttgcgatggtggggcacatactgatattggcaatcactacaggagtgacgacggcctttgtggtggtgcagaacatgggttctttggtgaccattgtgacacaaaagagtggggcttcggtttcagtactggttgggagaggcatgattttttgtcaacgaacaatgtcatagaagaggtgttcgggaagggctccagtgaagatggaagtgacactgctactggccaggaccttatctga

SEQ ID NO: 92 - protein, 486 aa, Zea mays
MVIRISFLRNARLQSPFLPSGVKETPIVDHNKRPASSDILDIVECKRLKQEDQIVTKEDNHTSAEEEFHDYPTYTTCERSFDSPLYESEESEDEGVDSPLHCSHARTYVEDGLWPASFHQSVGPFSLRKPVPIGSNHQAELPECRPFGGRTEEDESVKWIRNSVVPMPGTDASSLVLEPVHCKAGCDCLDEGSINCVKKHVMEARENLKDSVGADAFRELGFYDMGEEVASRWSEEEERLFQQVVSSNRASLRRNFWDELPLAFPSKSSKELVSYYFNVFMLRKRAEQNRFDPANIDSDDDEWQAGGDFEFPITGRTDEYMPIESLTDQDDVACNPFPLEGDLYGDSDDEDELDNSSGDRHNGVQRAGMLSEGHPEMSFIDHDQQTLKLDADAQDDSCTSFEAHQVGCDGGAHTDIGNHYRSDDGLCGGAEHGFFGDHCDTKEWGFGFSTGWERHDFLSTNNVIEEVFGKGSSEDGSDTATGQDLI

SEQ ID NO: 93 - protein, 50 aa, Artificial sequence
  motif 1
  VARIANT (1)..(1): Xaa can be Ile or Val
  VARIANT (6)..(6): Xaa can be Ser or Gln
  VARIANT (10)..(10): Xaa can be Gly or Arg
  VARIANT (14)..(14): Xaa can be Gln or Pro
  VARIANT (15)..(15): Xaa can be Lys or Gly
  VARIANT (17)..(17): Xaa can be Ile or Val
  VARIANT (18)..(18): Xaa can be Lys or Glu
  VARIANT (24)..(24): Xaa can be Ile or Val
  VARIANT (25)..(25): Xaa can be Thr or Ala
  VARIANT (27)..(27): Xaa can be Arg or Lys
  VARIANT (28)..(28): Xaa can be Ser or Arg
  VARIANT (29)..(29): Xaa can be Ser, Ala or Leu
  VARIANT (30)..(30): Xaa can be Arg or Lys
  VARIANT (31)..(31): Xaa can be Val or Leu
  VARIANT (32)..(32): Xaa can be Met or Lys
  VARIANT (33)..(33): Xaa can be Arg or Leu
  VARIANT (35)..(35): Xaa can be Leu or Ile
  VARIANT (37)..(37): Xaa can be Lys, Val or Ser
  VARIANT (40)..(40): Xaa can be Asn or Tyr
  VARIANT (41)..(41): Xaa can be Gln, His or Ala
  VARIANT (43)..(43): Xaa can be Arg, Gly or Asn
  VARIANT (44)..(44): Xaa can be Phe or Leu
  VARIANT (44)..(44): Xaa can be Phe or Leu
  VARIANT (46)..(46): Xaa can be Lys or Arg
  VARIANT (47)..(47): Xaa can be Met or Ala
XGKGRXDSCXCQVXXSXXCVRFHXXEXXXXXXXEXGXAFXXWXXDXXGEE

SEQ ID NO: 94 - protein, 35 aa, Artificial sequence
  motif 2
  VARIANT (1)..(1): Xaa can be Arg, Thr or Lys
  UNSURE (2)..(2): Xaa can be any naturally occurring amino acid
  VARIANT (5)..(5): Xaa can be Ser or Lys
  VARIANT (6)..(6): Xaa can be Arg or Lys
  VARIANT (7)..(7): Xaa can be Arg, Ser or Gly
  VARIANT (9)..(9): Xaa can be Glu or Lys
  VARIANT (10)..(10): Xaa can be Asp, Ser or Glu
  VARIANT (16)..(16): Xaa can be Tyr or Phe
  VARIANT (22)..(22): Xaa can be Gln or Arg
  VARIANT (25)..(25): Xaa can be Ala or Gly
  VARIANT (26)..(26): Xaa can be Asn or Tyr
  VARIANT (30)..(30): Xaa can be Ser, His or Val
  VARIANT (33)..(33): Xaa can be Asp, Asn or Lys
  VARIANT (34)..(34): Xaa can be Ser or Asn
XXFPXXXRXXLVSYYXNVFLLXRRXXQNRXTPXXI

SEQ ID NO: 95 - protein, 20 aa, Artificial sequence
  motif 3
  VARIANT (1)..(1): Xaa can be Pro or Ser
  VARIANT (2)..(2): Xaa can be Ile or Pro
  VARIANT (3)..(3): Xaa can be Thr or Arg
  UNSURE (4)..(5): Xaa can be any naturally occurring amino acid
  VARIANT (8)..(8): Xaa can be Val or Leu
  VARIANT (11)..(11): Xaa can be Val or Asn
  VARIANT (12)..(12): Xaa can be Phe or His
  misc_feature (16)..(16): Xaa can be Val or Ile
XXXXXIPXGPXXQAEXPEWT

SEQ ID NO: 96 - DNA, 3847 bp, Artificial sequence
  expression cassette
aatccgaaaagtttctgcaccgttttcaccccctaactaacaatatagggaacgtgtgctaaatataaaatgagaccttatatatgtagcgctgataactagaactatgcaagaaaaactcatccacctactttagtggcaatcgggctaaataaaaaagagtcgctacactagtttcgttttccttagtaattaagtgggaaaatgaaatcattattgcttagaatatacgttcacatctctgtcatgaagttaaattattcgaggtagccataattgtcatcaaactcttcttgaataaaaaaatctttctagctgaactcaatgggtaaagagagagattttttttaaaaaaatagaatgaagatattctgaacgtattggcaaagatttaaacatataattatataattttatagtttgtgcattcgtcatatcgcacatcattaaggacatgtcttactccatcccaatttttatttagtaattaaagacaattgacttatttttattatttatcttttttcgattagatgcaaggtacttacgcacacactttgtgctcatgtgcatgtgtgagtgcacctcctcaatacacgttcaactagcaacacatctctaatatcactcgcctatttaatacatttaggtagcaatatctgaattcaagcactccaccatcaccagaccacttttaataatatctaaaatacaaaaaataattttacagaatagcatgaaaagtatgaaacgaactatttaggtttttcacatacaaaaaaaaaaagaattttgctcgtgcgcgagcgccaatctcccatattgggcacacaggcaacaacagagtggctgcccacagaacaacccacaaaaaacgatgatctaacggaggacagcaagtccgcaacaaccttttaacagcaggctttgcggccaggagagaggaggagaggcaaagaaaaccaagcatcctccttctcccatctataaattcctccccccttttcccctctctatataggaggcatccaagccaagaagagggagagcaccaaggacacgcgactagcagaagccgagcgaccgccttctcgatccatatcttccggtcgagttcttggtcgatctcttccctcctccacctcctcctcacagggtatgtgcctcccttcggttgttcttggatttattgttctaggttgtgtagtacgggcgttgatgttaggaaaggggatctgtatctgtgatgattcctgttcttggatttgggatagaggggttcttgatgttgcatgttatcggttcggtttgattagtagtatggttttcaatcgtctggagagctctatggaaatgaaatggtttagggatcggaatcttgcgattttgtgagtaccttttgtttgaggtaaaatcagagcaccggtgattttgcttggtgtaataaagtacggttgtttggtcctcgattctggtagtgatgcttctcgatttgacgaagctatcctttgtttattccctattgaacaaaaataatccaactttgaagacggtcccgttgatgagattgaatgattgattcttaagcctgtccaaaatttcgcagctggcttgtttagatacagtagtccccatcacgaaattcatggaaacagttataatcctcaggaacaggggattccctgttcttccgatttgctttagtcccagaattttttttcccaaatatcttaaaaagtcactttctggttcagttcaatgaattgattgctacaaataatgcttttatagcgttatcctagctgtagttcagttaataggtaatacccctatagtttagtcaggagaagaacttatccgatttctgatctccatttttaattatatgaaatgaactgtagcataagcagtattcatttggattattttttttattagctctcaccccttcattattctgagctgaaagtctggcatgaactgtcctcaattttgttttcaaattcacatcgattatctatgcattatcctcttgtatctacctgtagaagtttctttttggttattccttgactgcttgattacagaaagaaatttatgaagctgtaatcgggatagttatactgcttgttcttatgattcatttcctttgtgcagttcttggtgtagcttgccactttcaccagcaaagttcatttaaatcaactagggatatcacaagtttgtacaaaaaagcaggcttaaacaatgatggacggttctttttctaacgaggatgtaaaaggcaaggatgttgatgaaaatttgatatctgattcaaggaaaagtgagaaagtggaaaatgaggatgaggtgaagagcgtggtggtcgtggaaactgatggagatgaggaaggaaataagggtgataacagtgagattgaggaactggatttagcaacttttgaggaatctgtttctagtcgtaagaggaaacgggattccatttatagaatgctgaactgggttactgagattgcaaaagatccatgtgatcccgtggttggatcgttacctgagtggtcaaagtggaaaagttacgggaatgaagaatgctggaagcaggttttggtgacccgggaatcgttgtttctgaaaagaaatgctgattcaacttcaagtgcagaggggtttgttaagcagaaatatcagaagatgcatccatgtatgtacgatgaccatgctggatctagttacaatcttagagagaggttaaaatgtagaaagctttttcctggggaaacatcgtctcaagcacttgtttgctcacagtcatcttctgcagccacccaaactgattcagattcttgcatggaaggggtttatgatggtgattcttcaactgaatgttcagtgcttgacctgccaattacaaagagaattcctgtggggccagtttttcaggctgaagtaccagaatggactggcatggcttctgaaagtgactcaaagtggcttgggactcgggtttggccacttgaaacttcaatcaacaaatttgttattgaaagggaacctatcggtaagggaaggtcagattcctgtggttgccaagtgccgaaatctatcaaatgtgtcagatttcacattactgagcgaaggtcgagagtgatgcgtgaactggggaaggcttttaatcaatggagatttgataagatgggtgaagaagtaaaactctcctggtcgttggaagatcaaaagaagtttggagctatagtgaggtcaaatcctctatctcttgataagtgtttttgggacgagatattccgatgtttcccaagtaggagaagggaagatctggtgagctattactacaatgtatttcttttgcagcgcagagcaaaccagaataggtccactccagacagcatcaatagtgatgatgatgaatcagaatgtgaattagtaaactatggctctaggcgtgaggcagtcaattcaccaggctccctcatatcagcaaagaagcaacataaatatgttaaatagtgtctgatcaggttgatgcacccagctttcttgtacaaagtggtgatatcacaagcccgggcggtcttctagggataacagggtaattatatccctctagatcacaagcccgggcggtcttctacgatgattgagtaataatgtgtcacgcatcaccatgggtggcagtgtcagtgtgagcaatgacctgaatgaacaattgaaatgaaaagaaaaaaagtactccatctgttccaaattaaaattggttttaaccttttaataggtttatacaataattgatatatgttttctgtatatgtctaatttgttatcatcc

SEQ ID NO: 97 - DNA, 2194 bp, Oryza sativa
aatccgaaaagtttctgcaccgttttcaccccctaactaacaatatagggaacgtgtgctaaatataaaatgagaccttatatatgtagcgctgataactagaactatgcaagaaaaactcatccacctactttagtggcaatcgggctaaataaaaaagagtcgctacactagtttcgttttccttagtaattaagtgggaaaatgaaatcattattgcttagaatatacgttcacatctctgtcatgaagttaaattattcgaggtagccataattgtcatcaaactcttcttgaataaaaaaatctttctagctgaactcaatgggtaaagagagagattttttttaaaaaaatagaatgaagatattctgaacgtattggcaaagatttaaacatataattatataattttatagtttgtgcattcgtcatatcgcacatcattaaggacatgtcttactccatcccaatttttatttagtaattaaagacaattgacttatttttattatttatcttttttcgattagatgcaaggtacttacgcacacactttgtgctcatgtgcatgtgtgagtgcacctcctcaatacacgttcaactagcaacacatctctaatatcactcgcctatttaatacatttaggtagcaatatctgaattcaagcactccaccatcaccagaccacttttaataatatctaaaatacaaaaaataattttacagaatagcatgaaaagtatgaaacgaactatttaggtttttcacatacaaaaaaaaaaagaattttgctcgtgcgcgagcgccaatctcccatattgggcacacaggcaacaacagagtggctgcccacagaacaacccacaaaaaacgatgatctaacggaggacagcaagtccgcaacaaccttttaacagcaggctttgcggccaggagagaggaggagaggcaaagaaaaccaagcatcctccttctcccatctataaattcctccccccttttcccctctctatataggaggcatccaagccaagaagagggagagcaccaaggacacgcgactagcagaagccgagcgaccgccttctcgatccatatcttccggtcgagttcttggtcgatctcttccctcctccacctcctcctcacagggtatgtgcctcccttcggttgttcttggatttattgttctaggttgtgtagtacgggcgttgatgttaggaaaggggatctgtatctgtgatgattcctgttcttggatttgggatagaggggttcttgatgttgcatgttatcggttcggtttgattagtagtatggttttcaatcgtctggagagctctatggaaatgaaatggtttagggatcggaatcttgcgattttgtgagtaccttttgtttgaggtaaaatcagagcaccggtgattttgcttggtgtaataaagtacggttgtttggtcctcgattctggtagtgatgcttctcgatttgacgaagctatcctttgtttattccctattgaacaaaaataatccaactttgaagacggtcccgttgatgagattgaatgattgattcttaagcctgtccaaaatttcgcagctggcttgtttagatacagtagtccccatcacgaaattcatggaaacagttataatcctcaggaacaggggattccctgttcttccgatttgctttagtcccagaattttttttcccaaatatcttaaaaagtcactttctggttcagttcaatgaattgattgctacaaataatgcttttatagcgttatcctagctgtagttcagttaataggtaatacccctatagtttagtcaggagaagaacttatccgatttctgatctccatttttaattatatgaaatgaactgtagcataagcagtattcatttggattattttttttattagctctcaccccttcattattctgagctgaaagtctggcatgaactgtcctcaattttgttttcaaattcacatcgattatctatgcattatcctcttgtatctacctgtagaagtttctttttggttattccttgactgcttgattacagaaagaaatttatgaagctgtaatcgggatagttatactgcttgttcttatgattcatttcctttgtgcagttcttggtgtagcttgccactttcaccagcaaagttc

SEQ ID NO: 98 - DNA, 56 bp, Artificial sequence
  primer: prm11394
ggggacaagtttgtacaaaaaagcaggcttaaacaatgatggacggttctttttct

SEQ ID NO: 99 - DNA, 50 bp, Artificial sequence
  primer: prm11395
ggggaccactttgtacaagaaagctgggtgcatcaacctgatcagacact

SEQ ID NO: 100 - DNA, 56 bp, Artificial sequence
  primer: prm11280
ggggacaagtttgtacaaaaaagcaggcttaaacaatgttgggtagtgagcaaact

SEQ ID NO: 101 - DNA, 49 bp, Artificial sequence
  primer: prm11281
ggggaccactttgtacaagaaagctgggttacagctcatgatttgaggc

SEQ ID NO: 102 - DNA, 1842 bp, Medicago truncatula
atggagtgcagttctgggagatctggtgatggagatagtggactcaaagatgataagagaagtgagcatagtactggtgatgatcatgaaagtcatcatcataaaaaggagattattgctgaggaagcacccattgctagtacagaaagatcaattgaggctggtccaagcacaatatcctcgcccaaaaatgataaggttgatgaacagcttgagacaacaaaagctcaaatgggtgaggtgagagaagaaaatcaacggttaaagatgtgcttgaacaaaataatgactgaataccgagcactggaaatgcaatttaacaatatggttaagcaagaaacaaaaaagaacaatgataataaccatgaagaaatgaatgcagaatcagatcttgtttctctcagtcttggaagagttcctagtaacaatattccaaaaaatgatcaagagaaagttaacaaagtgtctaaactagcattgaataatgatgaagaattcaataaggaagagttgtcacttggattggaatgtaaatttgaaacatcaaaatcaggtagcacaactgaagggttaccaaatattccaagtccagtgaatagttctgaagttgttccaataaagaatgatgaagttgtggagacttggccaccaagtaagacactcaataagacaatgagagatgctgaggatgaagttgctcaacaaactcctgcaaagaaagctagagtttgtgttagagcaagatgtgacaccccaacgatgaatgatggatgccaatggaggaagtatggacaaaaaattgcaaagggaaatccttgccctcgagcttactatcgctgcacagttgcaccatcatgtccagttagaaaacaggtacaaagatgtgttgaggacatgtctattctaatcacaacatacgaagggacacacaaccacagccttccactttcagcaacagcaatggcttccacaacttccgcggccgcatcgatgctattatcaggttcatcaacctcaaactctggttcaatgccatcagcacaaaccaacaataatcttcatggcctaaacttttatctaccggatggtacaaaatcaaatcaattatacctatccaaccctgcactatcatctcaacattcacatccaactatcactcttgacctcacttcaaacccatcaaattcttcaacatcatcaccctttgttagattcaattcaagctacaacaacaataaccaactaccaagatacccttcttccactcttagctttagttctcctgaatcaaatcccatgcattggaatagcttcctcaactatgctactactcaaaatcaaccatatagtaataataggaacaataataacctaagcactttaaactttggtagacaaaacacaatggaaagtatataccaaacctacatgcaaaaaaacaacaatagttcaaacatttcacaacatgtaggtttacaagatagtactatatctgcagcaacaaaagctatcacagcagatccaacttttcaatcagctttagctgcagcactttcttcgcttatcggaaacaccaccaatcaagggaatcaaaatcaaagtgcaggagaaaatttgagtcagaaaatgaaatgggctgagatgtttcaagtttcttctacttcattgccttcatcaagttctaaagtaaatggttgtgcttcaagtttcttgaacaaaacggcaccggtgaacaatacacagaatggaagtttgatgttgttgtctccttctttgccattttctgcaactaaaagtgcttctacatctcctggtggtgataatagtgacaacaccaattaa

SEQ ID NO: 103 - protein, 613 aa, Medicago truncatula
MECSSGRSGDGDSGLKDDKRSEHSTGDDHESHHHKKEIIAEEAPIASTERSIEAGPSTISSPKNDKVDEQLETTKAQMGEVREENQRLKMCLNKIMTEYRALEMQFNNMVKQETKKNNDNNHEEMNAESDLVSLSLGRVPSNNIPKNDQEKVNKVSKLALNNDEEFNKEELSLGLECKFETSKSGSTTEGLPNIPSPVNSSEVVPIKNDEVVETWPPSKTLNKTMRDAEDEVAQQTPAKKARVCVRARCDTPTMNDGCQWRKYGQKIAKGNPCPRAYYRCTVAPSCPVRKQVQRCVEDMSILITTYEGTHNHSLPLSATAMASTTSAAASMLLSGSSTSNSGSMPSAQTNNNLHGLNFYLPDGTKSNQLYLSNPALSSQHSHPTITLDLTSNPSNSSTSSPFVRFNSSYNNNNQLPRYPSSTLSFSSPESNPMHWNSFLNYATTQNQPYSNNRNNNNLSTLNFGRQNTMESIYQTYMQKNNNSSNISQHVGLQDSTISAATKAITADPTFQSALAAALSSLIGNTTNQGNQNQSAGENLSQKMKWAEMFQVSSTSLPSSSSKVNGCASSFLNKTAPVNNTQNGSLMLLSPSLPFSATKSASTSPGGDNSDNTN

SEQ ID NO: 104 - DNA, 1668 bp, Arabidopsis lyrata
atggaggttcttttgaaattacccacttcagagtctcctcttaaggataaggtttttggatctgttcaagtccatgaagctagtaaggatgatggagatcaccaagaacttgaatctgccaaggcagagatgagcgaggtgaaggaagagaacgagaagcttaaagggatgctggaacgaattgaaagtgattacaaatctctcaagctcagattcttcgacataattcaacaagaaccttcaaacaccgcaactagaaatcaaaacatggttgatcatcccaagccaacgacgacggatttgagttctattgaccaagaacgcgagcttgtatcgctttcactagggagaagaagttcttccccaagtgaatgcacccccaaaagagaagagaaaacggacgcaatcagcgcagaagtcaacgctgacgaagagttgaccaaggctggcttgaccctagggatcaataatggcaacggccgtgaaacgaacgagggtttatctatggagaatcgtgccaattctagccatggctcggaagaagctccaggagaaacttggccaccaggtaaagttgcggggaagagaagctctccagcaccagcctcaggtggcgatgctgatggtgaggccggtcaacaaaaccatgttaagagagctagagtttgtgttagagcaagatgtgacacgccaacgatgaatgatggttgtcaatggagaaaatatggacaaaagattgcgaaaggaaatccatgtccacgagcatattatcgctgcacggttgcacctggatgtccggttagaaaacaggtccaaagatgtgcagatgacatgtctatactaatcacaacctatgaaggaacacacagccattctcttccactctcggccaccaccatggcctccaccacttcagccgctgcctccatgctcctctcgggctcttcctcctcatcagccgccgaaatgatcggaaataacctctacgacaattcaagattcaacaacaacaacaaatccttctactcacccacgcttcactccccattacatcccaccgtcactctagacctcaccgctccacaacactcttcatcgtcttcttcttcattgccttctttaaatttcaacaaattctcaaactctttccaaagattcccatccacaagcctaaatttctcctctactacatcaacatcatcaaactcgtctactctcaacctacccgcgatttggggtaatgggtattcttcttatactccatatccttacaacaacgtccaatttgggacgtccaacctaggaaaaacagtccaaaatagccagtccttaaccgaaaccctaacaaaagcgcttacttccgacccaagttttcactcggtgatcgctgctgcgatctcaactatggtcggatccaacggggaacaacagatcgtcggtccacggcattcgattagcaataacattcagcaaaccaccgcgacaaataataacaaaggttgtggaggctattttagcagcttattgatgtctaacataatggcgagtaatcaaacgggtgcggctatggatcaaccatcgtcgcaacttcctcccttctctatgttcaagaattcttcttcttcgtcatccacgactaatttcgtgaacaacgaagagaaaagctag

SEQ ID NO: 105 - protein, 555 aa, Arabidopsis lyrata
MEVLLKLPTSESPLKDKVFGSVQVHEASKDDGDHQELESAKAEMSEVKEENEKLKGMLERIESDYKSLKLRFFDIIQQEPSNTATRNQNMVDHPKPTTTDLSSIDQERELVSLSLGRRSSSPSECTPKREEKTDAISAEVNADEELTKAGLTLGINNGNGRETNEGLSMENRANSSHGSEEAPGETWPPGKVAGKRSSPAPASGGDADGEAGQQNHVKRARVCVRARCDTPTMNDGCQWRKYGQKIAKGNPCPRAYYRCTVAPGCPVRKQVQRCADDMSILITTYEGTHSHSLPLSATTMASTTSAAASMLLSGSSSSSAAEMIGNNLYDNSRFNNNNKSFYSPTLHSPLHPTVTLDLTAPQHSSSSSSSLPSLNFNKFSNSFQRFPSTSLNFSSTTSTSSNSSTLNLPAIWGNGYSSYTPYPYNNVQFGTSNLGKTVQNSQSLTETLTKALTSDPSFHSVIAAAISTMVGSNGEQQIVGPRHSISNNIQQTTATNNNKGCGGYFSSLLMSNIMASNQTGAAMDQPSSQLPPFSMFKNSSSSSSTTNFVNNEEKS

SEQ ID NO: 106 - DNA, 1647 bp, Arabidopsis thaliana
atggaggttcttttgaaattaccctcttcagagtctcctcttaaggataaatttggatctgttcaaatccatgaagctaataagggtgatggtgatcatcaagaacttgaatctgccaaggcagagatgagcgaggtgaaggaagagaacgagaagcttaaaggaatgctcgaacgaattgaaagtgattacaaatctctcaagctcagattcttcgacataattcaacaagaaccttcaaacaccgcaactaaaaatcaaaacatggttgatcatcccaagccaacgacgacggatttgagttcttttgaccaagaacgcgagcttgtatcgctttcactagggagaagaagttcttccccaagtgatagcgtccccaaaaaggaagagaaaacggacgcaatcagcgcagaagtcaacgctgacgaagagttgactaaggccggcttgaccttagggatcaataatggcaacggaggtgaaccgaaagagggtttatctatggagaatcgtgcaaattctggctcggaagaagcttgggcgccaggtaaagttacggggaagagaagctctccagcaccagcctccggtggcgatgctgacggtgaggccggtcaacaaaaccatgttaagagagctagagtttgtgttagagcaagatgtgacacaccaacgatgaatgatggttgtcaatggagaaaatatggacaaaagattgcgaaaggaaatccatgtccacgagcatattatcgctgcacggttgcacctggatgtcccgttagaaaacaggtccaaagatgtgcagatgacatgtctatactaatcacaacctatgaaggaacacacagccactctcttccactctcagccaccaccatggcttccaccacatcagccgctgcctccatgctcctctctggctcctcctcctcaccagccgctgaaatgatcggaaataacctctacgacaattcaagattcaacaacaacaacaaatccttctattcacccacccttcactccccattacatcccaccgtcactctagacctcactgctccacaacactcttcctcgtcttcttcttcattgctttctttaaatttcaacaaattctcgaactctttccaaagattcccatctacaagcctaaatttctcttctacttcatcaacatcatcaaacccgtctactctcaacctacccgcgatttggggtaatgggtattcttcttatactccatatccttacaacaacgtccaatttgggacgtccaacctaggaaaaacagtccaaaatagccagtccttaaccgaaaccctaacaaaagcgcttacttccgacccaagtttccactcggtgatcgctgctgccatctcaactatggtcggatcaaatggagaacaacagattgtcggtccacggcattcgattagcaataacattcaacaaaccaacacgacgaataataacaaaggatgtggaggctattttagcagcttattgatgtctaacattatggcgagtaatcaaacgggtgcttctttggatcaaccatcgtcgcaacttcctcccttctctatgttcaagaattcttcttcttcgtcttctacgactaatttcgtgaacaaggaagagaaaagctag

SEQ ID NO: 107 - protein, 548 aa, Arabidopsis thaliana [sequence omitted]

SEQ ID NO: 108 - DNA, 1878 bp, Brachypodium distachyon
atgatcaagggagagacctggcggcagcttggcaaccatgaagaccggttgaaaggcgagacttcatcagagagtttgattatttctttcgataagcatatgaaagatgaccatcgagtctcagatgacagttttttcaagacattacaaaaccaatcaagcacaacaaaagaggttcaacatgacaggcttgcatccacaagggcagagatgggtgaagtgaggcaagagaacgagaggctcaagacgatgctatctcgcatcatagaggaccatcgatctcttcaaaagcacttcaacgacgttctgcagcaaggacgagagaagaagctcgccggtcgatcgcccgctgacgtcgaggagaccgaactcgtctcgctgagcctcggcacgagcacgagcacgagcagcaggtggtacaccacggaagagaagagcagtaccattgcagaaggccaaggcagacaactaggccttctgaagattagacaaggagctgcaggcatctcccttggcctgtcagcaggctcccaattatctggtgcaactgatcagaaggtgccccggccggatgtgctgctgagcttgagccctgaaggcagctctgaggagacagccaaggatgccgacgacacaacggcgtcgatggaacagtggcctgcgccgagccaaacggccaagagctcgaggagtggggccggcaccggcggcacggaaaccgaggatgaggtagccccacaggcgccaatggtcaagaaggccagggtctcagtgagggcaaggtgtgacgcaccaacgatgaatgatgggtgccagtggaggaagtatggtcagaagatatccaaggggaacccgtgcccgcgcgcctactaccggtgcaccgtcgcagcaggatgcccagttaggaagcagatgtcagaaatccttcgtttagcccatgaatcgccaaccgcaattcacgaggtgcagagatgcgcggaggacatgtcgatcctgatcagcacgtacgaggggaggcacaatcacccgctgtccgcctccgcctccgccatggcctccaccacctccgccgccgcctccatgctcctctccggaagctcctcttcctcccccggcctattattcccctcccccagcctcagcttcggcggcctcccggcgacgtccatcaccgccgccccatccgcctcgtctcaccccaccatcaccctcgacctcacctcgccgccaacaccggccaccgcctctcactctcactcgcccttctccttcagcagcagcagattctcctccagcttattattcaacggcagcggtggcagttctaggtaccctccgtcgacgagcttctccttctccggctccggttccaccaacgctactactaccgcggcatggccggccacgggcgggtacttgagctacgggcaatcaccgccgtcgttgtcaggatcctcgtcctacaacaacgccggcaatggcaatggcatcgttgtccaaggaaggcaattgcagttgcagcagcaaggcggctcaacgtcagcggcactgtaccagcagcagcggctggcagtggtgccgccgcaggtggacacgatcgcgaaggtgatcacgtcggacccagggttccacacggcgctcgcagctgccatcacgtcgtacgtcggcactactaagccggcggtgacgccaccgacgggaggaggagggctcgagtggggggagcacctcgggctggggccggcatcagcatcggcggtggagagcgggaaggcgcccttcttgcagccgtcgcgggcattgtcaggctcgacgagtggcactgcttccatgtctccggtgaagaacagggagcacacattagctgaaggtttatga

SEQ ID NO: 109 - protein, 625 aa, Brachypodium distachyon
MIKGETWRQLGNHEDRLKGETSSESLIISFDKHMKDDHRVSDDSFFKTLQNQSSTTKEVQHDRLASTRAEMGEVRQENERLKTMLSRIIEDHRSLQKHFNDVLQQGREKKLAGRSPADVEETELVSLSLGTSTSTSSRWYTTEEKSSTIAEGQGRQLGLLKIRQGAAGISLGLSAGSQLSGATDQKVPRPDVLLSLSPEGSSEETAKDADDTTASMEQWPAPSQTAKSSRSGAGTGGTETEDEVAPQAPMVKKARVSVRARCDAPTMNDGCQWRKYGQKISKGNPCPRAYYRCTVAAGCPVRKQMSEILRLAHESPTAIHEVQRCAEDMSILISTYEGRHNHPLSASASAMASTTSAAASMLLSGSSSSSPGLLFPSPSLSFGGLPATSITAAPSASSHPTITLDLTSPPTPATASHSHSPFSFSSSRFSSSLLFNGSGGSSRYPPSTSFSFSGSGSTNATTTAAWPATGGYLSYGQSPPSLSGSSSYNNAGNGNGIVVQGRQLQLQQQGGSTSAALYQQQRLAVVPPQVDTIAKVITSDPGFHTALAAAITSYVGTTKPAVTPPTGGGGLEWGEHLGLGPASASAVESGKAPFLQPSRALSGSTSGTASMSPVKNREHTLAEGL

SEQ ID NO: 110 - DNA, 1809 bp, Carica papaya
atgaggaaattcatttatgcagagcagcagtgcgtatatacaacaaaaagaaaagaggagactccatttaaatccatttatatggagttggtgctaaaaatggcagaaccagatgcttccgttcaagaagaaattacgtgcaaggaagaacctaccaaggttgggtttggaagagaatatgaagatggcggtggtctttgttcgtcttcaccaaggactagaatggatgacaaaaatggtcaggaggatgaactagaatctgcaaaggctgaaatgggtgaagtaagagaagaaaatgagagactaaaactgatgctggagaaaattgagaaggattacaagtcccttcaactgcggtttttctcatttttgaaacaagaaagttcaagaaaatctgaatcttcagctcctaattctcacgattttgaggatgaagaaccagaactcgtgtctctttgccttgggagaaatccaaaagaggccaaaaaagaagagaagatcacagcaagggattttaacaaagctaaagaggatggtggagatcatctcaaggccagcctaacacttgggttggattcaaaatctcaattatctggtgaattaagcccagaaaacagttcagaagaaccaaaggaagaagaagcaggtgaaatatggccaccgagcaagattcagaagaccatgaaaagtggagacgatgaagctgcacaacaaaatcacgtcaagagagctagggtttgtgttagagcaagatgcgatgcaccaacgatgaatgatggatgccagtggaggaaatacgggcaaaaaattgcgaaagggaatccatgcccacgagcttactatcgttgcacggttgctccaggctgcccagttagaaaacaggtacaaagatgtgccgaggatatgtccatcttgattaccacttatgaaggaacccacaatcacccgcttccaatttcggccacggccatggcatccacgacttctgctgctgcttccgtgctgttatcaggctcgtccacattgtcaacgcagtcggccatggtcagctcctcagtcacagcatattccagtactgatcaattccatggatcaaacttcagcctctatgatagttcaagaacaaaacaattctacttaccaaacacttccatgtctttgctcccaacagttactctagaccttactacacccctatcctcttcttcatctacaaatttcaacaggttttcaaaccaaagatttccctcaacgagtttcaatttttcttcctcagataaatccaccattaatctaccaaccatatggggaaatgggtaccctgcaagttttggaacactaccctacactcaaactcaaataggacctttttcaaattttgcacaacaatcccacgaacaatcttcttcatctaattataatttggaaaaaagccagcaagctgcagcttctcaacagtctttgacagaaacgttgaccaaagccataactacagacccaagcttccagtcagtaatcgctgcagctatttcaacaatggttgctggcagtggaacaaacgcgggtgcagagcaagaaaaaagtggaaaggagatcaattgtgggcagaatctgatacaagccgtagcagtttccaataattcatcgagccaggatggagccaagggatgtggatcaagctacttcaatggattactttcctcttccaaacctaaaacaggaggtttgaaccagcctccattgccgttttccatttttaaggttgctacttccttgcctacttctgttaacaaggaaaagaagaggtga

SEQ ID NO: 111 - protein, 602 aa, Carica papaya
MRKFIYAEQQCVYTTKRKEETPFKSIYMELVLKMAEPDASVQEEITCKEEPTKVGFGREYEDGGGLCSSSPRTRMDDKNGQEDELESAKAEMGEVREENERLKLMLEKIEKDYKSLQLRFFSFLKQESSRKSESSAPNSHDFEDEEPELVSLCLGRNPKEAKKEEKITARDFNKAKEDGGDHLKASLTLGLDSKSQLSGELSPENSSEEPKEEEAGEIWPPSKIQKTMKSGDDEAAQQNHVKRARVCVRARCDAPTMNDGCQWRKYGQKIAKGNPCPRAYYRCTVAPGCPVRKQVQRCAEDMSILITTYEGTHNHPLPISATAMASTTSAAASVLLSGSSTLSTQSAMVSSSVTAYSSTDQFHGSNFSLYDSSRTKQFYLPNTSMSLLPTVTLDLTTPLSSSSSTNFNRFSNQRFPSTSFNFSSSDKSTINLPTIWGNGYPASFGTLPYTQTQIGPFSNFAQQSHEQSSSSNYNLEKSQQAAASQQSLTETLTKAITTDPSFQSVIAAAISTMVAGSGTNAGAEQEKSGKEINCGQNLIQAVAVSNNSSSQDGAKGCGSSYFNGLLSSSKPKTGGLNQPPLPFSIFKVATSLPTSVNKEKKR

SEQ ID NO: 112 - DNA, 1845 bp, Carica papaya
atggagaaagttagagttacagaagagaagagaatgggttctcctggtaatcatgaagaagaagaagattcaacaaaagaaaaagcggctaaggttggaaccaagagaaagaatcccgatcatgatgatataaagtcattatcacctaatcaaaaagatttaggctgcaataaacaggaacctattgtgtcaaacacagaaagctcaaccatggagcatgactctaagatgatatcttcttcaatcctaaaagagcaggataataagcttgaatctacgagggcagaaataggggaggtacgagaagagaaccaaagactaaaaatgtatttaagtcgaataatgaaggattaccaaaccttacaaatgcaatactatgaagtaatccaacaagaagatcaaattaagaaatcgccgcatcaaagtcaccaagaaacaatggaggaatccgagcttttctcacttagccttggacgagtctcgaatgatcattcaagaaaagattacgagaagaacaaagaaaaacaagatgagaaagataaactagagggattaagtcttgggttgaactacaagtatgaagtgtccaaatcattagatactgctttgccaaattcaagccctgccaacagtatctctgattatgaaataaaggaagaaggtacagagacttggccacccaataaagctgtcaacactacaacagttagaaatacagaagaccaagaagttttgcagcaaaacgcagtcaagaaagctagggtttctgtcagagctagatgtgatacacccacgatgaatgatgggtgccaatggagaaaatatggacaaaaagttgccaaaggaaacccatgccctcgagcgtactatcgctgcactgttgcaccttcatgcccagtaagaaaacaggtgcaaagatgtgcagatgatatgtccatcttaatcaccacttatgaaggaacacacaaccaccctcttcctatggcagctactgcaatggcttccaccacttcagccgcagcttcaatgcttctctctggttcatcttcatcaacttctcgtccttcaccctccaataatccaccattacctctaccaactactccctctaatctccatggattaaacttctacctatctgatacctcaaaatccaagcagattttcttacccaactctccactctcatccacaacatcataccctaccatcactcttgatctcacctcatcaacaccatcctcttcctcatctccatttaatagattctcctctcaaactccaagatatccttccacaagcctcaacttcagttcttcctcacaatccaacacattatattggagtaatggttttcttacccatggcaataataacaatattccccaaccctacatcaagaacctaaatcttggaagaccgtctatattagagaacaacatttatcaatcattcttgcaaaagaatcatcaacaatctatgccaccagatactgttgctgctgccactaaggcaatcactacagacccaagttttcaatcagctttaagggcagctctcacctcaatcattggaaacaatggtagcagcggtggtattagtgctggaaatcaattaggtgcagataagttaaagtggggagtagagcaacttccatttgtttctggtttctcgtcagcaacatcttcaaaaaccaatggatgtgcatccagttacttgaacaaatcatcttcaacaacaactcaatcagggagtttgatatttctgcctccgccattgccattttccacttccaagagtgcatctgcatcacctagtgatcatactaaagatcaaagcagttga

SEQ ID NO: 113 - protein, 614 aa, Carica papaya
MEKVRVTEEKRMGSPGNHEEEEDSTKEKAAKVGTKRKNPDHDDIKSLSPNQKDLGCNKQEPIVSNTESSTMEHDSKMISSSILKEQDNKLESTRAEIGEVREENQRLKMYLSRIMKDYQTLQMQYYEVIQQEDQIKKSPHQSHQETMEESELFSLSLGRVSNDHSRKDYEKNKEKQDEKDKLEGLSLGLNYKYEVSKSLDTALPNSSPANSISDYEIKEEGTETWPPNKAVNTTTVRNTEDQEVLQQNAVKKARVSVRARCDTPTMNDGCQWRKYGQKVAKGNPCPRAYYRCTVAPSCPVRKQVQRCADDMSILITTYEGTHNHPLPMAATAMASTTSAAASMLLSGSSSSTSRPSPSNNPPLPLPTTPSNLHGLNFYLSDTSKSKQIFLPNSPLSSTTSYPTITLDLTSSTPSSSSSPFNRFSSQTPRYPSTSLNFSSSSQSNTLYWSNGFLTHGNNNNIPQPYIKNLNLGRPSILENNIYQSFLQKNHQQSMPPDTVAAATKAITTDPSFQSALRAALTSIIGNNGSSGGISAGNQLGADKLKWGVEQLPFVSGFSSATSSKTNGCASSYLNKSSSTTTQSGSLIFLPPPLPFSTSKSASASPSDHTKDQSS

SEQ ID NO: 114 - DNA, 1479 bp, Glycine max
gctgttgatgaacttgaaactgccaaagccgaaatgggtgaagtgatggaagaaaatcaacgactaaagacgtgtttgagccgaatactaaacgattaccgcacactccaaatgcaattccacaacagagttgaacaagagacaaaagactcttctgatcagaaagtgaacaacaacaatgaccatcaaagagaggaatcagacctagtttccctcagtcttggaagacttccaactagaaacaatgagaaagttaataataaaccattgaaagaggaagaaaaagaagataaagaaggctttgttgaagaagtgccaaaggaagaagcagcaggtgagagttggccacaaaggaagggacacaagacagctagagatactactggtgaggatgaagtttctcaacaaaatcctgcaaagaaagcaagggtttgtgttagggcaagatgtggcaccgcaactatgaatgatgggtgtcaatggaggaaatatggacagaaaatttcaaagggaaatccttgccctcgagcttactatcgttgcacggttgcaccatcatgccccgtaagaaagcaggtgcaaagatgtgctcaagacatgtccatattaatgaccacctacgaaggtaaccacaaccaccctcttccactttcagccacagccatggcctccaccatttcagcagctgcttccatgctattatccggctcatcaacctcacactccggatcaaggccttcaacagccatgaccaccgccgcttcctatcagacggttccaaatcaaagcaatacttacttgtcccatcctgcagcactctcatcttcaccttcacaccccaccatcactctagacctcacttccaataataatccatcctcatcttctgttcctcttgttaaattcacttcgaattcaacctttaataacccacaaaggtaccctctttccacaagcctaaacttcagttactcagaatccaataatgcaacttcttggagcaataatgggttcctcagctacaacaacactctaccatataatagcaatagaaatgtgacaaatgtccttagcaacataaaccttggaaaacaacaacaacgaccattggaaaacatctacaattcctacctgcaaagaaacaacaatattaatccaatcccgccaccacaacattctctaccagacaccatagctgcagcaacaaaagaaaacctgagtcagcaaatgaaatggggtgaattgtttccttcatcttcttctgcattaccttcatcttcaacaaaagtcaatggttgtgcatcaagcttcttgaacaaatcagccgctaatacaaaaccaggaacaactttgatgtttcttcagccacttttgcctctttctagccccaaaagcgcttctggaacatacgcatgtgatgttcacactttcatcaatttcaaaaattatagtatgaaaagtagtctaacaatcttatag

SEQ ID NO: 115 - protein, 492 aa, Glycine max
AVDELETAKAEMGEVMEENQRLKTCLSRILNDYRTLQMQFHNRVEQETKDSSDQKVNNNNDHQREESDLVSLSLGRLPTRNNEKVNNKPLKEEEKEDKEGFVEEVPKEEAAGESWPQRKGHKTARDTTGEDEVSQQNPAKKARVCVRARCGTATMNDGCQWRKYGQKISKGNPCPRAYYRCTVAPSCPVRKQVQRCAQDMSILMTTYEGNHNHPLPLSATAMASTISAAASMLLSGSSTSHSGSRPSTAMTTAASYQTVPNQSNTYLSHPAALSSSPSHPTITLDLTSNNNPSSSSVPLVKFTSNSTFNNPQRYPLSTSLNFSYSESNNATSWSNNGFLSYNNTLPYNSNRNVTNVLSNINLGKQQQRPLENIYNSYLQRNNNINPIPPPQHSLPDTIAAATKENLSQQMKWGELFPSSSSALPSSSTKVNGCASSFLNKSAANTKPGTTLMFLQPLLPLSSPKSASGTYACDVHTFINFKNYSMKSSLTIL

SEQ ID NO: 116 - DNA, 1572 bp, Glycine max
atgggtgtagcgagagaagaaaatcaactgctaaagacgtgtttgaacaaaataatgaatgaatatcggacactagagatgcaatttcaggatatactaaagcaacaagggacaaaaaagaacgctgataaaggaaatgatgataagcatgaagaaatattagaggaagcggatcttgtttccctctgccttggaagagttccaagaagtgatgagaaaatcaaagtttctaataagccattgaaggatgatgaagggttgactcttggactagagtgcaaatttgaaacatcaaagtcaggaagcacaaatgaagctttacctaataatccaagcccagaaaatagttgtgaagtagtaccaaaggaagaaggtggggaaagtaaggaggcactaaagacaatgagatcagacacagaggatgaagttgctcagcaaaatcctacaaagaaacctcgagtttgtgttagagcaagatgtgacactccaacaatgaacgacggatgccaatggaggaaatatggacaaaagatttcaaagggaaatccttgccctcgagcttactatcgttgcacaattgcaccatcatgcccagttagaaaacaggtgcaaagatgtgttgacgacatgtccattttattcaccacttacgagggaacccacaaccacactcttccaccatcagctactgctatggcatccacaacttccgcagctgcatccatgttattgtctggttcatcaacctctaactctgcctcaataccttcaacagcaaccacaaatctccaaggcctcaacttttatctctcagacggttcaaaaccaaggcaactatacctctccaaccctgcactatcatcttcactttcacatccaaccatcactctcgacctcactacttcacacccttcagcctcttcctcatcatcatcaccctttgtcagattcaattcaaactacaacaacaatcaccaacccagatacccctcttcctcatcaagcctaagcttcagtactagtaattcctccgaaattgctaatgctatatcttggagcaacggcttcctcaacaataataggaacatccttagcagtgtgaactttggaagacaacaaatggaaaacatgaaccagtcctacatgcaaaagaacaacaacaacacaagccttcttcctcaagctgatactatatctgcagcaacgaaagtgatcacagcggaccccgcttttcagtcagctttggcagcagcacttacttcgtttattggcggtggtggtgttggaaacacgcgaggaagtcaaggtggtaatgttgttggagaaagtttgagtttgggtcagaaaatgaaatggggtgaggtgtttccagcgtctaataattctaattcttcaatttcgaacaataaagtcaatggttgtgcatccagcttcttgaacaaaacgccggcagcgaatacacagacgaaaaatttgatgtttctgccgccgtcgtcattgccgttttcttctactcccaaaagtgcatctgcatctcctgctgctgataatagcgacaccaccaccaattga

SEQ ID NO: 117 - protein, 523 aa, Glycine max
MGVAREENQLLKTCLNKIMNEYRTLEMQFQDILKQQGTKKNADKGNDDKHEEILEEADLVSLCLGRVPRSDEKIKVSNKPLKDDEGLTLGLECKFETSKSGSTNEALPNNPSPENSCEVVPKEEGGESKEALKTMRSDTEDEVAQQNPTKKPRVCVRARCDTPTMNDGCQWRKYGQKISKGNPCPRAYYRCTIAPSCPVRKQVQRCVDDMSILFTTYEGTHNHTLPPSATAMASTTSAAASMLLSGSSTSNSASIPSTATTNLQGLNFYLSDGSKPRQLYLSNPALSSSLSHPTITLDLTTSHPSASSSSSSPFVRFNSNYNNNHQPRYPSSSSSLSFSTSNSSEIANAISWSNGFLNNNRNILSSVNFGRQQMENMNQSYMQKNNNNTSLLPQADTISAATKVITADPAFQSALAAALTSFIGGGGVGNTRGSQGGNVVGESLSLGQKMKWGEVFPASNNSNSSISNNKVNGCASSFLNKTPAANTQTKNLMFLPPSSLPFSSTPKSASASPAADNSDTTTN

SEQ ID NO: 118 - DNA, 1821 bp, Glycine max
atggagtttggttcagaaagatctggtcatgaagtcaaggatgagaagagaagtgaatctagtgttggagatgaagaagatcgtcgtgaacaagagattgttacgcaggagccacccctgtctactaccgaaagatccacagtggaggctgggccaaatgcttcttccctaaccaaaaaggaagaggctgttgatgaacttgaagttgccaaagccgaaatgggtgaagtgatggaagaaaaccaacgactaaagacgtgtttgaaccgaatactgaacgattaccgcgcactccaaatgcaattccacaacatagttgaacaagagacaaaagattcttctgatcagaaagtgaacaacaacaatgaccaatatcaaatagatgaatcaaacctagtttccctcagtcttggaagacttccaacaagaaacaataataaagtccctaataataaaccattgaaagaggaagcagaaaaagaagataaagaaggcttgtcccttggattagactgcaaatttgaaacatcaaaatctggaataagcacaactgaatatttgccaattcatcaaagccctaataatagtgttgaagaagtgccaaaggaagaagcagctggtgagagttggcaacctggcaagggaataaagacagctagagatgctacaggagaggatgaagtttctcaacaaaatccagcaaagaaagcaagggtttgtatgaacgatggatgtcaatggaggaaatatggacagaagatttcaaagggaaatccttgccctcgagcttactatcgttgcacggttgcaccatcatgcccagtaagaaagcaggtgcaaagatgtgcacaagacatgtccatattattcaccacctacgaaggcaaccacaaccaccctcttccactctcagccacagccatggcctccaccacttcagcagctgcatccatgctattatccggctcatcaacctcacactccggaacaaggccttccacagccatgaccaccgcagatcttcatggaatgaacttcttcctatcagacggttccaaattatcaaagcaatactacctgtcccatcctgcagcactctcatcttcaccttcacaccccaccatcactcttgacctaacttccaataataatccatcctcatcatcttctgctgctcttgttaaattcacttcaaactcaaactacaataacacacaaaggtaccctctttccacaagcttaaacttcagttcctcagaatccaacaatgcaacaacttcttggagcaataatgggttcctcagctacaacaacactctaccatataatagcaataggaatgtgacaaatgtccttagcaacataaaccttggaagacaacaacaacaaccaatggaaaacatctacaactcctacatgcaaaggaacaacaatgttccaatctctccaccacaacattctctgccagataccatagctgcagcgacaaaagtaatcactgcagaccccaattttcaatcagctttggcagcagcacttacaacaattattggttctggaagcactactcaaggaaaccatggtggtgcaggggaaaatctgagtcagaaaatgaaatggggtgaactgtttccttcatcttcttctgcattaccttcatcttcaacaaaagtcaatggttgtgcatcaagcttcttgaacaaatcagccgctaatacacaaccaggaacagctttgatgtttcttcagccacctttgcctctttctagccccaaaagcgcttctgggtctccaggagatcatatagacaagagaaattga

SEQ ID NO: 119 - protein, 606 aa, Glycine max
MEFGSERSGHEVKDEKRSESSVGDEEDRREQEIVTQEPPLSTTERSTVEAGPNASSLTKKEEAVDELEVAKAEMGEVMEENQRLKTCLNRILNDYRALQMQFHNIVEQETKDSSDQKVNNNNDQYQIDESNLVSLSLGRLPTRNNNKVPNNKPLKEEAEKEDKEGLSLGLDCKFETSKSGISTTEYLPIHQSPNNSVEEVPKEEAAGESWQPGKGIKTARDATGEDEVSQQNPAKKARVCMNDGCQWRKYGQKISKGNPCPRAYYRCTVAPSCPVRKQVQRCAQDMSILFTTYEGNHNHPLPLSATAMASTTSAAASMLLSGSSTSHSGTRPSTAMTTADLHGMNFFLSDGSKLSKQYYLSHPAALSSSPSHPTITLDLTSNNNPSSSSSAALVKFTSNSNYNNTQRYPLSTSLNFSSSESNNATTSWSNNGFLSYNNTLPYNSNRNVTNVLSNINLGRQQQQPMENIYNSYMQRNNNVPISPPQHSLPDTIAAATKVITADPNFQSALAAALTTIIGSGSTTQGNHGGAGENLSQKMKWGELFPSSSSALPSSSTKVNGCASSFLNKSAANTQPGTALMFLQPPLPLSSPKSASGSPGDHIDKRN

SEQ ID NO: 120 - DNA, 1647 bp, Glycine max
gaaatagtaataattgaggccatgtcaaaaatttctggtcctagtggtccagatgagatagaagagaagagagtaacaaaggaagaaaaaatcaaatctgctaaaactgagatgggtgaggtgaaggaagaaaatgagagattgaagatgatgctggaaagagtagaaaaggactaccactcccttcaactccgtttctttgacatccatcacgaagatgtttcaaagaagggtttagctgattcttctacttgccatgatcatgaaactgaagagcttgtgtcactttgccttggaaggagtccaatggtgcctaagaaggaagcaagaattggaaactccaacaaactaaaagaagatgttggacccaaccttacacttggattagactccaaacaccttttgtcaatggaggttgtgtctgattttagtcccatgaacagctccgaacaaccaaaggaagcggaagaagaggtaacattgtcaacaaatcaatcagcaaaagtgataaatgtaaatgatgacatgtcagatcaaatgccagccaagagagccagggtatctgtgagagctagatgtgatactcccacgatgaatgatggatgccagtggaggaaatatggacagaagatagcaaagaggaatccttgtccaagggcatactatcgttgcacagttgcaccaacttgcccagtcaggaggcaggtgcaaaggtgtgctgaggacttgtccatcttaatcaccacatatgaaggaactcataaccaccctcttccagtttcagccacagccatggcttcaaccacttcagctgctgcttccatgctgttgtcaggttcttcaacatctcaccacccaacaaaccacaattctgcatcttttggaaatgctcctaccacactacaaagtggtctgagtttcagtcaccagtttgatgaatcaagaaccaaacaagttttctcacccccaaaccatgcttcactacacatgttcccaacaatcactctagacatgacttattcagcttctaattcctcctcattaactcaattccatcatcgcttaccttcaacaatggcatcaatttcaaacttaaaattttctccagctagtctcagctgttcacaagataataacttcataccctccatttggagtaaggggggtgacactacaacaccaccaataattgacaaaatccccactaggccagttatcaagggaaatccatatttccaagaaaatttctaccaacaaagcataacaaaccaaactcctttcaaagaagctttggcagaaacaataaccaaagcaatcagcacagacccgagtcttcgttcagtaatagctgctgcagtttcatcaatagtggggaatggatcaaacagtgggaaccaagaaggagcagagaatgttcttggttcagggttgaacttaaaacttggggatcatcttcaattggcttcatccaatcccttgaaccaaaatgggaaagggtgcttaacaggctacttcaaaagtttgtcctctaagaattccgaggcaggaaacttcatttttctccaaccaccattgccattttctttctccaagagtggcacaaatcagctcaaccattatgttccagaaatgaacacacatcattag

SEQ ID NO: 121 - protein, 548 aa, Glycine max
EIVIIEAMSKISGPSGPDEIEEKRVTKEEKIKSAKTEMGEVKEENERLKMMLERVEKDYHSLQLRFFDIHHEDVSKKGLADSSTCHDHETEELVSLCLGRSPMVPKKEARIGNSNKLKEDVGPNLTLGLDSKHLLSMEVVSDFSPMNSSEQPKEAEEEVTLSTNQSAKVINVNDDMSDQMPAKRARVSVRARCDTPTMNDGCQWRKYGQKIAKRNPCPRAYYRCTVAPTCPVRRQVQRCAEDLSILITTYEGTHNHPLPVSATAMASTTSAAASMLLSGSSTSHHPTNHNSASFGNAPTTLQSGLSFSHQFDESRTKQVFSPPNHASLHMFPTITLDMTYSASNSSSLTQFHHRLPSTMASISNLKFSPASLSCSQDNNFIPSIWSKGGDTTTPPIIDKIPTRPVIKGNPYFQENFYQQSITNQTPFKEALAETITKAISTDPSLRSVIAAAVSSIVGNGSNSGNQEGAENVLGSGLNLKLGDHLQLASSNPLNQNGKGCLTGYFKSLSSKNSEAGNFIFLQPPLPFSFSKSGTNQLNHYVPEMNTHH

SEQ ID NO: 122 - DNA, 1446 bp, Glycine max
gttgatgatcagcttgagactgctaaagctgaaatgggtgtggtgagagaagaaaatcaacggctaaagatgtgtttgaacaaaataatgaatgaatatcggacactagagatgcaatttcaagatatactaaagcaacaagggacaaaaaagaacgttgataaaggaaaggctgatagccatgaagaaatattagaggaatcggatcttgtttccctctgccttggaagagttcctaccattaatgcaagaagtgatgagaaaatcaaagtttctaataagccattgaaggatgatgaagggtttaataacgaagagttgactcttggactagattgtgaagtaccaaaggaagaaggtggggagagtaaggaggcactcaagactatgagagacagtacagaggatgaagttgctcagcaaaatcctacaaagaaacctcgagtttgtgttagagcaagatgtgacactccaacaatgaatgacggatgccaatggaggaaatatggacaaaagatttcaaaggggaatccttgccctcgagcttactatcgttgcacaattgcaccgtcatgcccagttagaaaacaggtgcaaagatgtgctgatgacaagtcgattttaatcaccacctacgaagggacccacaaccactctcttccaccaacagccactgccatggcatccacaacttccgcagctgcctccatgctcttgtctggttcatcaacctctaactctaactccgcctcaataccttcagcaacccccacaaatctccacggcctcaacttctatctctctgaaggttcaaagccaagacaactatacctatccaaccctgcactatcgtcttcaccttcacatccaaccataactctagacctcactacttcacaccctgcagcatcttcctcctcatcatcaccctttttcagattcaattcaaactacaacaacaacaaccaacccagatacccttcttcctcatcaagcctaagcttcagtagtaataattcctcccaaattgccaatgctatatcttggagcaacggcttcttaaaccacaataatagggacatccttagtagtgtgaactttggaagacaacaacaaatggagaacgtcaacaacaacaacaacaacacaagccttgttcctcaagctgatactatctctgcagcaacgaaagtgatcacagcggaccccacttttcagtcagctttggcagcagcactttcttcgtttattggtggcggtggtgttggaaacacgcgaggaagtcaaggttgtaatttcggagaaagtttgagtttgggtcagaaaatgaaatggggtgagacggaaagtttgatgtttctgccgccgtcgtctttgccgttttcttctaccaccaaaagtgcatctgcatctcctgctgataatagcaacaccaccatcaattga

SEQ ID NO: 123 - protein, 481 aa, Glycine max
VDDQLETAKAEMGVVREENQRLKMCLNKIMNEYRTLEMQFQDILKQQGTKKNVDKGKADSHEEILEESDLVSLCLGRVPTINARSDEKIKVSNKPLKDDEGFNNEELTLGLDCEVPKEEGGESKEALKTMRDSTEDEVAQQNPTKKPRVCVRARCDTPTMNDGCQWRKYGQKISKGNPCPRAYYRCTIAPSCPVRKQVQRCADDKSILITTYEGTHNHSLPPTATAMASTTSAAASMLLSGSSTSNSNSASIPSATPTNLHGLNFYLSEGSKPRQLYLSNPALSSSPSHPTITLDLTTSHPAASSSSSSPFFRFNSNYNNNNQPRYPSSSSSLSFSSNNSSQIANAISWSNGFLNHNNRDILSSVNFGRQQQMENVNNNNNNTSLVPQADTISAATKVITADPTFQSALAAALSSFIGGGGVGNTRGSQGCNFGESLSLGQKMKWGETESLMFLPPSSLPFSSTTKSASASPADNSNTTIN

SEQ ID NO: 124 - DNA, 1416 bp, Glycine max
atgtcaaaaatgtctagccccaatggtccagagatagaagagaagagagttacaaaggaagataaattcaaatctgctaaaactgaaatgggtgaggtgaaggaagaaaatgagagattgaagatgatgctggaaagagtagaaaaggactatcactcccttcaactccgtttctttgacatccttcacaaagatgtttcaaagaagggtttagctgtttcatctacttcccttgatcatgaaactgcagagcctgagcttgtgtcactttgccttggaaggagtccaatggagcctaagaaagaattagcaagaattggatactccaacaaaccaaaagaagaagacgttggacccaaccttactcttggattagactccaaacaccttttctcagaagaaccaaaggaagtagaagctgagggaacaaatcaatcagcaaaagtgataaatatgaatgatggatgccagtggaggaaatatggacagaagatagcaaagggaaatccatgtccaagggcatactatcgttgcacagttgcaccaacatgtccagtcaggaagcaggtgcaaaggtgtgctgaggacttgtccatcttaatcaccacatatgaaggaacacacaaccaccctcttgcagtttcagccacagccatggcttcaaccacttcagctgctgcttccatgctgttgtcaggttcttcaacatctcaccttacaagccacaattctgcatcttttggaaatgctcctaccacactactcaatgccaaacaaatgttgtcaccaccaaaccatgtctcaccaaatctgttttcaacaatcactttagacatgacttcttcagcttctaattcctcctcatcaactcaattccatcatcgcttaccttcgacgatagcttcaatttcaaacccaaaattttctccagctagtctcagcttttgttcccaagataataacttcataccatccatttggggtaaggggggtgacacttccacaacaccaattgacaaaatccccatgactaggccacaaactccttccaaagaagctttggcagaaacaataacaaaggcaatcagcacagacccgagtcttcgttcagtaatagctgctgcagtttcatcaatagtggggaatggatcaagcagtgggaaccaagaggaatcagacaatgttcttggttcagggttgaacttaaaacttggggagcattttcaattggcttcacccaatcccttgaaccagaataggaaagaatgcttaacaagctacttcaaaagtttgtcctcaaagaattctgaggcaggaagcttcatttttctccaaccaccattgccattttctttctccaagagtagcacaaatcaggtcaaccattatgttcaagaaatgaactcacatcattag

SEQ ID NO: 125 - protein, 471 aa, Glycine max
MSKMSSPNGPEIEEKRVTKEDKFKSAKTEMGEVKEENERLKMMLERVEKDYHSLQLRFFDILHKDVSKKGLAVSSTSLDHETAEPELVSLCLGRSPMEPKKELARIGYSNKPKEEDVGPNLTLGLDSKHLFSEEPKEVEAEGTNQSAKVINMNDGCQWRKYGQKIAKGNPCPRAYYRCTVAPTCPVRKQVQRCAEDLSILITTYEGTHNHPLAVSATAMASTTSAAASMLLSGSSTSHLTSHNSASFGNAPTTLLNAKQMLSPPNHVSPNLFSTITLDMTSSASNSSSSTQFHHRLPSTIASISNPKFSPASLSFCSQDNNFIPSIWGKGGDTSTTPIDKIPMTRPQTPSKEALAETITKAISTDPSLRSVIAAAVSSIVGNGSSSGNQEESDNVLGSGLNLKLGEHFQLASPNPLNQNRKECLTSYFKSLSSKNSEAGSFIFLQPPLPFSFSKSSTNQVNHYVQEMNSHH

SEQ ID NO: 126 - DNA, 1469 bp, Glycine max
atggaggccatgttaaaattgtctagtctttgtggtcaagagatagatgataagagagatacttccatttgctcagaagaggacttgtgtattgaaaagggtagtaaggaagataaacttgaatctgctaaagctgagatgagtaaggtgaaggaggagaatgaaagattgaagatgatgatagaaagagtaggaaagaattaccattctcttcaacttcgtttctttgacatccttcatagagaaacttcaaacaaaggtgtggaagattcagctgtttcccttgatgaagtggaggaacctaagcttgtgtcactttgtcttggaacaagtccatgggagcataaaaaggatggaataatctgtaactctagcaaacataaagaaaatgaagatttggaagccagccttacccttggtttagactgcaaaggtgtgtcttcaaaggaacaggtatctgatatgaacacctcagaagaaaaggaagaagattcaacaaataaattagtaaggaccaaagatggaggtgatgaaatttcagagataacacccccagccaagagggctagagtttgtgtcagagcaagatgtgatagtcccgttatgcatgatggatgccagtggaggaaatatggacagaagatagcaaaaggaaatccatgtccaagagcatactatcgttgcacacttgctccagcatgcccggttaggaaacaggtgcaaagatgtgctgatgacatgtccatcttaatcaccacatatgaaggaactcacaaccacccaattccagcttcagccacagccatggcttccaccacttctgctgctgtttccatgttgttgtcaggctcttcaacatctcagcctacagatcacagttttgcctatcatgcaaattctcctacactgttcagtggtgtcaatttcagtcttttagaccaaccaagagcaaaccaagtcttgttaccaaccccttcctcacatttactcccaacaatcactctagaccttacttctactccatcctattcattaaatcaagggaattgtttaccatcaaactttgcttcaaccccaagattccctccattaagtctaaacttttggtccccagagtccaacattccactatccttttggggcaagggaattcctaacaatggcactattcctattgacaaaactcacatcaagccattcaatataggaaaccaatttcaagaacatttctaccaacattacttcaagaaccaaactccattcagggaggctttggcagaaacactaaccaaagcaatcagcacagacacgagttttcggtcagcgatagctgctgcagtttcatctataaggggacaaggatcaagcagtgagaacaagggtgatggagaggttttaggttcaggattgagcttgaaacttggggagcatcctcaacttgcttcttccaattccttgaacaagaatga

SEQ ID NO: 127 - protein, 489 aa, Glycine max
MEAMLKLSSLCGQEIDDKRDTSICSEEDLCIEKGSKEDKLESAKAEMSKVKEENERLKMMIERVGKNYHSLQLRFFDILHRETSNKGVEDSAVSLDEVEEPKLVSLCLGTSPWEHKKDGIICNSSKHKENEDLEASLTLGLDCKGVSSKEQVSDMNTSEEKEEDSTNKLVRTKDGGDEISEITPPAKRARVCVRARCDSPVMHDGCQWRKYGQKIAKGNPCPRAYYRCTLAPACPVRKQVQRCADDMSILITTYEGTHNHPIPASATAMASTTSAAVSMLLSGSSTSQPTDHSFAYHANSPTLFSGVNFSLLDQPRANQVLLPTPSSHLLPTITLDLTSTPSYSLNQGNCLPSNFASTPRFPPLSLNFWSPESNIPLSFWGKGIPNNGTIPIDKTHIKPFNIGNQFQEHFYQHYFKNQTPFREALAETLTKAISTDTSFRSAIAAAVSSIRGQGSSSENKGDGEVLGSGLSLKLGEHPQLASSNSLNKN

SEQ ID NO: 128 - DNA, 1422 bp, Lotus japonicus
atgggtggagtgatacaagaaaatcaaagattgaagacgtgtttgaaccgaatactgaatgattaccgcacactccaaatgcaattccacaacatagctgaacaagacacaaaaacttcttctgataaagcaaacaacaacaaccacaatcaagataaaatgatggaggaatccgagctagtttctctcagtcttggaaggcttccaagtaatccaagaaacaatgagaaagctaaagttatctctagaccattgaaagaggaagagaatagggaaggtttagcacttggacttgactgcaaatttgaaacatcaaaatctggaagcactgacaatagctctgaattgccattgaaggaagatgttggggagacttggaaaccaagtaaggttgacaagacatcaattacaattcctggagaggatgaagtttctcaacaaaataatcctgcaaagaaaactagagtttgtgtgagagcaagatgtgacaccctcactatgaatgatggatgccaatggaggaaatatggacagaagatttcaaagggaaacccttgccctcgagcttactatcgttgcacagttgcaccctcttgtcctgtcagaaagcaggtgcaaagatgtgctcaggacatgtccattttgatcaccacctacgaagggaaccacaaccaccctcttcctctttccgccaccgccatggcctccaccacttccgccgctgcctccatgctactgtccggctcatcaacctcccacgccggatcaacaaccgcagatcttcatggaatgaacttttgtctttccgacggatccaaatcaaagcaattttacatgtctcatcctgcactatcaccttcaccttcacaccccaccatcactcttgacctcactacttccaataataatctacctttatcctcacttccttttggtagattcacttcaaatttcaacaaccccccaagatacccttcttccacaagtttgaacttcagtaactcagagtccaatgcaatgtcttggagcaatggcttcctcagctacaacacttctctaccatataacaacaacaacatccttagcaaccctggacgacaacaacaacaacaaccaatggaaaataacatcttgaattcttacatgcaaaggaacaataacaatgttcctacagacactattgcggaggcaacgaaagcaatcacagcagatccaacttttcagtcagctttggcagcagcacttacatcaatcattggcagtactggatcaagcactactactcaaggattaaaccagaataatgttggagagattttgggtaagaaaaggaaatgggaggagttgtttccatcatcttcttctactttaccattttctatccccaaaagcgcgtctgcgtctccggatgataatagagac

SEQ ID NO: 129 - protein, 474 aa, Lotus japonicus
MGGVIQENQRLKTCLNRILNDYRTLQMQFHNIAEQDTKTSSDKANNNNHNQDKMMEESELVSLSLGRLPSNPRNNEKAKVISRPLKEEENREGLALGLDCKFETSKSGSTDNSSELPLKEDVGETWKPSKVDKTSITIPGEDEVSQQNNPAKKTRVCVRARCDTLTMNDGCQWRKYGQKISKGNPCPRAYYRCTVAPSCPVRKQVQRCAQDMSILITTYEGNHNHPLPLSATAMASTTSAAASMLLSGSSTSHAGSTTADLHGMNFCLSDGSKSKQFYMSHPALSPSPSHPTITLDLTTSNNNLPLSSLPFGRFTSNFNNPPRYPSSTSLNFSNSESNAMSWSNGFLSYNTSLPYNNNNILSNPGRQQQQQPMENNILNSYMQRNNNNVPTDTIAEATKAITADPTFQSALAAALTSIIGSTGSSTTTQGLNQNNVGEILGKKRKWEELFPSSSSTLPFSIPKSASASPDDNRD

SEQ ID NO: 130 - DNA, 1587 bp, Lotus japonicus
atgtcaaaaaattctagtcctagtggttcagagatagaagagaagagagttacttctgtttttcttgatgatggtttcagcaatcaagaagttaaaaaggtagaaaggctcaaatctgcaaaagctgagatgggtgaggtgaaagaagaaaacgagagactcaagatgatgttgaatcaagtagaaaaggactatcactcacttcaactacgtttctttgacatcctccacaaagaagtttccaacaaaggtgtagctgaaaattcacctactccccatgatcatgaaaatgaagaacctgaacttgtgtcactttgccttggaagaggacctagagaatctaagaaaggagcaataatagaaaagttgaaccaaccaagagaaaaagaagatgtggaagtgaaccttagtcttggattggagtcaaaatatcttctttcaatggaggtggtgtctgatttgagtcctgtgaacagctcagaagaattaccaaaggaagtagagttagctgagggaacattgaaaacaaataaatcagcaaaagtggtgaatgtgaatgatgacatttcagatcaaatgcctgcaaagaaagccagggtatctgtgagagctagatgtgacactcccacgatgaatgatggatgccagtggagaaaatatggacagaagatagcaaaaggaaatccatgtccacgagcatattatcgttgcacagttgcaccagcatgcccagttaggaaacaggtgcaaagatgtgctgatgacttgtccatcttaatcaccacatatgaaggaacccacaaccacccacttccagtctcagcagcagccatagcttccaccacttctgctgcagcttcaatgcttctatcaggttcttcaacatctcaccatgcaggttacacttctgcactcagtggtctcagtttcaatcagcaatttggtgaacaaagagcaaaacatgccttcttaccaccaaaccaagcctcacatttgttccctacagtcactgtagacctcacttcatcaaacaacatggcttcttcaaaccaaagattttctccaaacagtcttagcttttgctcccctcatgagcctaatttcacacattccaatgtttggggtaataaggggttccccaataatggcacattaagacccttaaaccatttccaagaacataatttctaccatcaacaatgcatgacaacaaaccaaacaagtaattctttggcagaaacaattaccaaagcaatcagcacagatccaagccttcactcagtgatagctgctgctgtttcatcactagtgggaccaagtgggaaccaaaaaccagggttgaacttgaaactgggtcagcatcatgatcatcaattagtttcttctaatttgttgaaccagaataatgggaaaggatgcataaatggctactttaaaaggttgacctctgcaaattctcaggccagaaacttcatgcttctcaaacccacattgccattttctgtttccaatagtagcacaggcacatctccttccattgttaatcagatcaagcataattatgatcctgatatgaacacacatcat

SEQ ID NO: 131 - protein, 529 aa, Lotus japonicus
MSKNSSPSGSEIEEKRVTSVFLDDGFSNQEVKKVERLKSAKAEMGEVKEENERLKMMLNQVEKDYHSLQLRFFDILHKEVSNKGVAENSPTPHDHENEEPELVSLCLGRGPRESKKGAIIEKLNQPREKEDVEVNLSLGLESKYLLSMEVVSDLSPVNSSEELPKEVELAEGTLKTNKSAKVVNVNDDISDQMPAKKARVSVRARCDTPTMNDGCQWRKYGQKIAKGNPCPRAYYRCTVAPACPVRKQVQRCADDLSILITTYEGTHNHPLPVSAAAIASTTSAAASMLLSGSSTSHHAGYTSALSGLSFNQQFGEQRAKHAFLPPNQASHLFPTVTVDLTSSNNMASSNQRFSPNSLSFCSPHEPNFTHSNVWGNKGFPNNGTLRPLNHFQEHNFYHQQCMTTNQTSNSLAETITKAISTDPSLHSVIAAAVSSLVGPSGNQKPGLNLKLGQHHDHQLVSSNLLNQNNGKGCINGYFKRLTSANSQARNFMLLKPTLPFSVSNSSTGTSPSIVNQIKHNYDPDMNTHH

SEQ ID NO: 132 - DNA, 840 bp, Malus x domestica
atggaggctgctttgggaaagtctaatagccatggaggatcagaaagggaagagaagacagtagttcttgaatctagtagtattgcagatgatcaagaagctggttccagagaagaaattgttctcaaagttggaaatggaaggccatgccaggagaataatgaagtgaaatcatcttcacctaaacaaaaagatttgagttgcaagcagatatcaaccacaagtaatacaaatttaaaggggtcctcggcggaacctgatcattcagcagcatctacttcaccaagtataaaggaaaaggattgtcagcttgaatctgcaagagccgaaatgggtgaagttcgagaagaaaaccaaaggctgaagaagtacttagatcggataacggaggagtaccagacacttcaaatgcagttatatgacattcaacaaaaagcaaacaagtccaaggacattgcaattccaagtactaataagaattatgatcaagatgaggaatccgagcttgtgtcactcagcctcggatcattttcgggcaaacctaaatggaatcaaaagaatgataaaaaccctagcactagtcaagggaaagtagaaaatgagtcagatggagaaagcttgtctttggggctagactgcaaatatgaagcacctaaatcaagtgctacaactgatcaagtgcccttggccaatccaagccctcgaagcagccttgaagaagtgcccaaggaagaagctggtgagacttggccaccaagaaaagttctcaagacagtgagatcaagtggtatggaagatgaagttgtgcaacagagcccagccaagaaagctagggtttca

SEQ ID NO: 133 - protein, 280 aa, Malus x domestica
MEAALGKSNSHGGSEREEKTVVLESSSIADDQEAGSREEIVLKVGNGRPCQENNEVKSSSPKQKDLSCKQISTTSNTNLKGSSAEPDHSAASTSPSIKEKDCQLESARAEMGEVREENQRLKKYLDRITEEYQTLQMQLYDIQQKANKSKDIAIPSTNKNYDQDEESELVSLSLGSFSGKPKWNQKNDKNPSTSQGKVENESDGESLSLGLDCKYEAPKSSATTDQVPLANPSPRSSLEEVPKEEAGETWPPRKVLKTVRSSGMEDEVVQQSPAKKARVS

SEQ ID NO: 134 - DNA, 1758 bp, Malus x domestica
atggaggctgcttccggaaagtctaatagccatggaggatcagaaatggaagaggaaagaatagtacttgaatctagtagtatcgctgatgatcaagaagctggttacaaagaagacataattgttctcaaaatgtcgaccacaagtaatataaaggggtcctcggcggaacctgatcattcagtggcatctacttcatcaagcctaaaggaamaggattatcagcttgaatctgctagagcggaaatgggtgaagttagagaagaaaaccaaaggctgaagaagtacttggaycggataacggaggactaccagacacttcaaatgcagttctatgacattcaacaaaaagcaaacaagtccaaggacattgcaattccaagtactattaagaaatataaccaagacgaggaatccgagcttgtgtcactcagcctcggatcattttctggaaaacctaaatggaatcaaaagaatgataaaaaccctagcactagtcaagggaatgtagaaaatgagtcagatggagagagcttgtcattggggctagactgcaaatatgaattagcagctaaatcaagtgcyrcaactgatcaagtgcccttggcaaatccaagccctggaagcagccttgaagaagtgcccaaggaagaagctggtaagacttggcaaccaaaaaaagttctcaagacaatragatcaagtgctatagaagatgaagttgcgcaacagagcccagccaagaaagctagggtttcagtgagagccagatgtgacaccccaacgatgaatgatggatgccaatggaggaaatatgggcaaaagattgcaaaaggaaatccatgccctcgtgcttactaccgttgcaccattgcaccttcgtgtccagtaagaaaacaggtacaaaggtttgcagaggacatatccatcttaatcaccacctatgaaggaacacacaatcacccacttccgatgtcagccacagctatggcttccactacctctgccgctgcttccatgstattatccggttcatcatcttcaagctctggcagcctgaacccatcaactaccgctgcgcacgatcttcatggttacaatttctacctttctgataactcaaaatccagattctacacacccaactcttcactctcatcttctctcccaacaatcaccttagacctcacttcaaacccttcatcaacatccaattccttgtcccatctcaacaaattctcttcttcatcatcaagttcttcccgtcaactttacccttccaccagccacaactttggatcaaattctgagtccaacaccaacatttcttggaggacccccttacctccatataatatcagtaacaagaatcaaattgcaccactaagtagtcttggaatcaggcagcagcccctgcaaaacagcatgtaccaaaactacatgcagaagaatattaaccctaaccctaatccccatcaaggagttccgcatcagtttcaaccagactctattgcagctgcaaccaaggcaatcacatctgaccctagcttccaatctgccttagccgccgcccttacatcaatcattggcaacaacagtactgttgggacaactggcattactggaaccctaggtcatcttaagcaagcagatggtggagacagtagtatcagtttggctcagaaattcaaatggagtgaccactttccagkaagtactactgctttctccattccttcagtcacagatagggaataa

SEQ ID NO: 135 - protein, 585 aa, Malus x domestica
  misc_feature (72)..(72): Xaa can be any naturally occurring amino acid
  misc_feature (195)..(196): Xaa can be any naturally occurring amino acid
  misc_feature (232)..(232): Xaa can be any naturally occurring amino acid
  misc_feature (341)..(341): Xaa can be any naturally occurring amino acid
  misc_feature (571)..(571): Xaa can be any naturally occurring amino acid
MEAASGKSNSHGGSEMEEERIVLESSSIADDQEAGYKEDIIVLKMSTTSNIKGSSAEPDHSVASTSSSLKEXDYQLESARAEMGEVREENQRLKKYLDRITEDYQTLQMQFYDIQQKANKSKDIAIPSTIKKYNQDEESELVSLSLGSFSGKPKWNQKNDKNPSTSQGNVENESDGESLSLGLDCKYELAAKSSXXTDQVPLANPSPGSSLEEVPKEEAGKTWQPKKVLKTXRSSAIEDEVAQQSPAKKARVSVRARCDTPTMNDGCQWRKYGQKIAKGNPCPRAYYRCTIAPSCPVRKQVQRFAEDISILITTYEGTHNHPLPMSATAMASTTSAAASMXLSGSSSSSSGSLNPSTTAAHDLHGYNFYLSDNSKSRFYTPNSSLSSSLPTITLDLTSNPSSTSNSLSHLNKFSSSSSSSSRQLYPSTSHNFGSNSESNTNISWRTPLPPYNISNKNQIAPLSSLGIRQQPLQNSMYQNYMQKNINPNPNPHQGVPHQFQPDSIAAATKAITSDPSFQSALAAALTSIIGNNSTVGTTGITGTLGHLKQADGGDSSISLAQKFKWSDHFPXSTTAFSIPSVTDRE

SEQ ID NO: 136 - DNA, 1239 bp, Malus x domestica
atgaagaaggattaccattctctccagctgcggtttttcgaaatcctcaagcaacaggcttccaaaaaagctgtaaatgtcgcgggtcatcgaataatcgaagaaccggaggagctcttgtctctttgtcttggaagaagtccaagggagcctaaaagtgatcatgaaactactgccagtagcaacttcacaaaacttgcacaagttgatgatggtgaagagaacttgatggccaatcttactcttggattaggttctgatgagactagtttggaagaacctaataagaatcatgcagaagctggaggtggagaagcatcgtcgccaccatcgagtaaaacgcggaaaacgatgaggaatgaagacggtgaacctccaccgcaggtcaatgcaaaacgagctagggtttctgtgagaactagatgtgatgccccaacgatgaatgatggatgccaatggagaaaatatggacagaagactgcaaargraaatccatgcccgcgagcatactatcgctgcacagttgcaccagcgtgccctgtgagaaagcaggtgcaaagatgttatgaggatatgtccatcttaatcaccacctatgaaggaactcacaaccacccacttccattcacagccacttccatggcttccaccacctctgccgcagcttccatgctgttgtccggctcttccacatctcacccggrtttcggttccacagccaccctaatcaatggatcagaatwtggtgccttcgataactcaagaacacaactctacatgcccaaatcttcmcaccctttgctccccacaatcactctcgacctcactgcctctacatcctcttctagtacgtttccttcaagtctaagcttttgctccccgtcagattccaacagtttgcccataagttggggcaatggataccttaaatatggcttgccactgtccgacaaaactcaagttggatcctacaatcttggaaaagcatcccaagagtatttccatcaaacttacgcagaaaagatccatcaagcttcttcccaggtgtctttgacagaatcactaaccaaygcaatcacgtctgacccgaatttcaagtcggtaattgcagtagcactttcatctatggtcggaggtgstggtggcgccacccataggaaccaaggcgaaggctgcgaaagaatgggaaaacagttgaagtgggatgaagctactcatcagtttacttctcaaaagtga

SEQ ID NO: 137 - protein, 412 aa, Malus x domestica
  misc_feature (163)..(163): Xaa can be any naturally occurring amino acid
  misc_feature (235)..(235): Xaa can be any naturally occurring amino acid
  misc_feature (248)..(248): Xaa can be any naturally occurring amino acid
  misc_feature (264)..(264): Xaa can be any naturally occurring amino acid
  misc_feature (380)..(380): Xaa can be any naturally occurring amino acid
MKKDYHSLQLRFFEILKQQASKKAVNVAGHRIIEEPEELLSLCLGRSPREPKSDHETTASSNFTKLAQVDDGEENLMANLTLGLGSDETSLEEPNKNHAEAGGGEASSPPSSKTRKTMRNEDGEPPPQVNAKRARVSVRTRCDAPTMNDGCQWRKYGQKTAKXNPCPRAYYRCTVAPACPVRKQVQRCYEDMSILITTYEGTHNHPLPFTATSMASTTSAAASMLLSGSSTSHPXFGSTATLINGSEXGAFDNSRTQLYMPKSXHPLLPTITLDLTASTSSSSTFPSSLSFCSPSDSNSLPISWGNGYLKYGLPLSDKTQVGSYNLGKASQEYFHQTYAEKIHQASSQVSLTESLTNAITSDPNFKSVIAVALSSMVGGXGGATHRNQGEGCERMGKQLKWDEATHQFTSQK

SEQ ID NO: 138 - DNA, 1758 bp, Malus x domestica
atggaggctgcttccggaaagtctaatagccatggaggatcagaaatggaagaggaaagaatagtacttgaatctagtagtatcgctgatgatcaagaagctggttacaaagaagacataattgttctcaaaatgtcgaccacaagtaatataaaggggtcctcggcggaacctgatcattcagtggcatctacttcatcaagcctaaaggaamaggattatcagcttgaatctgctagagcggaaatgggtgaagttagagaagaaaaccaaaggctgaagaagtacttggatcggataacggaggactaccagacacttcaaatgcagttctatgacattcaacaaaaagcaaacaagtccaaggacattgcaattccaagtactattaagaaatataaccaagacgaggaatccgagcttgtgtcactcagcctcggatcattttctggaaaacctaaatggaatcaaaagaatgataaaaaccctagcactagtcaagggaatgtagaaaatgagtcagatggagagagcttgtcattggggctagactgcaaatatgaattagcagctaaatcaagtgctgcaactgatcaagtgcccttggcaaatccaagccctggaagcagccttgaagaagtgcccaaggaagaagctggtaagacttggcaaccaaaaaaagttctcaagacaatgagatcaagtgctatagaagatgaagttgcgcaacagagcccagccaagaaagctagggtttcagtgagagccagatgtgacaccccaacgatgaatgatggatgccaatggaggaaatatgggcaaaagattgcaaaaggaaatccatgccctcgtgcttactaccgttgcaccattgcaccttcgtgtccagtaagaaaacaggtacaaaggtttgcagaggacatatccatcttaatcaccacctatgaaggaacacacaatcacccacttccgatgtcagccacagctatggcttccactacctctgccgctgcttccatgctattatccggttcatcatcttcaagctctggcagcctgaacccatcaactaccgctgcgcacgatcttcatggttacaatttctacctttctgataactcaaaatccagattctacacacccaactcttcactctcatcttctctcccaacaatcaccttagacctcacttcaaacccttcatcaacatccaattccttgtcccatctcaacaaattctcttcttcatcatcaagttcttcccgtcaactttacccttccaccagccacaactttggatcaaattctgagtccaacaccaacatttcttggaggacccccttacctccatataatatcagtaacaagaatcaaattgcaccactaagtagtcttggaatcaggcagcagcccctgcaaaacagcatgtaccaaaactacatgcagaagaatattaaccctaaccctaatccccatcaaggagttccgcatcagtttcaaccagactctattgcagctgcaaccaaggcaatcacatctgaccctagcttccaatctgccttagccgccgcccttacatcaatcattggcaacaacagtactgttgggacaactggcattactggaaccctaggtcatcttaagcaagcagatggtggagacagtagtatcagtttggctcagaaattcaaatggagtgaccactttccaggaagtactactgctttctccattccttcagtcacagatagggaataa

SEQ ID NO: 139 - protein, 585 aa, Malus x domestica
  misc_feature (72)..(72): Xaa can be any naturally occurring amino acid
MEAASGKSNSHGGSEMEEERIVLESSSIADDQEAGYKEDIIVLKMSTTSNIKGSSAEPDHSVASTSSSLKEXDYQLESARAEMGEVREENQRLKKYLDRITEDYQTLQMQFYDIQQKANKSKDIAIPSTIKKYNQDEESELVSLSLGSFSGKPKWNQKNDKNPSTSQGNVENESDGESLSLGLDCKYELAAKSSAATDQVPLANPSPGSSLEEVPKEEAGKTWQPKKVLKTMRSSAIEDEVAQQSPAKKARVSVRARCDTPTMNDGCQWRKYGQKIAKGNPCPRAYYRCTIAPSCPVRKQVQRFAEDISILITTYEGTHNHPLPMSATAMASTTSAAASMLLSGSSSSSSGSLNPSTTAAHDLHGYNFYLSDNSKSRFYTPNSSLSSSLPTITLDLTSNPSSTSNSLSHLNKFSSSSSSSSRQLYPSTSHNFGSNSESNTNISWRTPLPPYNISNKNQIAPLSSLGIRQQPLQNSMYQNYMQKNINPNPNPHQGVPHQFQPDSIAAATKAITSDPSFQSALAAALTSIIGNNSTVGTTGITGTLGHLKQADGGDSSISLAQKFKWSDHFPGSTTAFSIPSVTDRE

SEQ ID NO: 140 - DNA, 2217 bp, Malus x domestica
atggaggctgctttgggaaagtctaatagccatggaggatcagaaagggaagagaagacagtagttcttgaatctagtagtattgcagatgatcaagaagctggttccagagaagaaattgttctcaaagttggaaatggaaggccatgccaggagaataatgaagtgaaatcatcttcacctaaacaaaaagaatttgagttgcaagcagaggtcctgaaattagggtacgtacaccatcaatcaacatctacaatttgctttcgttatttaacgaagatagtgaaatattggaatcgggcggggtcctcggcggaacctgatcattcagcrgcatctacttcaccaagtataaaggaaaaggattgtcagcttgaatctgcaagagccgaaatgggtgaagttcgagaagaaaaccaaaggctgaagaagtacttagatcggataacggaggagtaccagacacttcaaatgcagttatatgacattcaacaaaaagcaaacaagtccaaggacattgcaattccaagtactaataagaattatgatcaagatgaggaatccgagcttgtgtcactcagcctcggatcattttcgggcaaacctaaatggaatcaaaagaatgataaaaaccctagcactagtcaagggaaagtagaaaatgagtcagatggagaaagcttgtctttggggctagactgcaaatatgaagcacctaaatcaagtgctacaactgatcaagtgcccttggccaatccaagccctcgaagcagccttgaagaagtgcccaaggaagaagctggtgagacttggccaccaagaaaagttctcaagacagtgagatcaagtggtatggaagatgaagttgtgcaacagagcccagccaagaaagctagggtttcagtgagagttagatgtgacaccccaacgatgaatgatggatgccaatggaggaaatatgggcaaaaaattgcaaaaggaaatccatgtcctcgtgcttactaccgttgcaccattgcaccttcgtgtccagtaagaaaacaggtacaaagatgtgcagaggacatgtccatcttaatcaccacctatgaaggaaatcacaatcacccacttccaatgtcagccacagcaatggcttccaccacctctgcagccgcttccatgctattatccggttcatcatcatcaagctccggccacttgaacccatcagctaccgccaccagtactaccgctgcgcacgatcttcatggttacaatttctatctttccgataactcaaaatccagattctacacacccaactcttcactttcgtcttctctcccaacagtcatcttagacctcacttcaaaaccttcatcaacatccaattccatgtcccatttcaacaaattctcttcgtcatcaagttcttcccatcaactttaccctcccacaagcctcaactttggatcaaattctgagtccagcaccaacatgtcttggagtaataatgggctccttccctatgggacccacttacctccatacaatatcagtaacaagaatcaaagtgcgccactaagtagtcttggaatcaggcagcagcacatgcaaaacaacatctaccaaaactacatgcagaagaatatcaaccctcaccctaatcctcctcaaggagttcctcatcaatttcaaccagactctattgcagctgccaccaaggcaatcacatctgaccctagctttcaatccgccttagccgccgcgctcacatcaatcattggcagcaacagtactgttgggaccactggcattgctggaaccctaggtcatattaatcaagcaggtggtggagacagtagtatcagtctggctcagaaattcaaatggaatgaccactttccaggaagtactactactactacatcttcttcttcaccattccttcaatcacagatagggttctgcagttgggtttcggcattggatttgaagggggatactgatgggtggaagagctgggcgtttgtggtgcaaattgtggtgacaatgacttctctcgtgttgctgatgctctacaatgccgctgcraatacggtgttgtatatgtattgccgggctatgaatggtgagcttaccatggaaattgcaaaggagtttgcgagggagtatrtgagcttgcccttcgacaacgaaaaagttcctcatgttgtttcggttgcacatgcttga

SEQ ID NO: 141 - protein, 738 aa, Malus x domestica
  misc_feature (111)..(111): Xaa can be any naturally occurring amino acid
  misc_feature (692)..(692): Xaa can be any naturally occurring amino acid
  misc_feature (720)..(720): Xaa can be any naturally occurring amino acid
MEAALGKSNSHGGSEREEKTVVLESSSIADDQEAGSREEIVLKVGNGRPCQENNEVKSSSPKQKEFELQAEVLKLGYVHHQSTSTICFRYLTKIVKYWNRAGSSAEPDHSXASTSPSIKEKDCQLESARAEMGEVREENQRLKKYLDRITEEYQTLQMQLYDIQQKANKSKDIAIPSTNKNYDQDEESELVSLSLGSFSGKPKWNQKNDKNPSTSQGKVENESDGESLSLGLDCKYEAPKSSATTDQVPLANPSPRSSLEEVPKEEAGETWPPRKVLKTVRSSGMEDEVVQQSPAKKARVSVRVRCDTPTMNDGCQWRKYGQKIAKGNPCPRAYYRCTIAPSCPVRKQVQRCAEDMSILITTYEGNHNHPLPMSATAMASTTSAAASMLLSGSSSSSSGHLNPSATATSTTAAHDLHGYNFYLSDNSKSRFYTPNSSLSSSLPTVILDLTSKPSSTSNSMSHFNKFSSSSSSSHQLYPPTSLNFGSNSESSTNMSWSNNGLLPYGTHLPPYNISNKNQSAPLSSLGIRQQHMQNNIYQNYMQKNINPHPNPPQGVPHQFQPDSIAAATKAITSDPSFQSALAAALTSIIGSNSTVGTTGIAGTLGHINQAGGGDSSISLAQKFKWNDHFPGSTTTTTSSSSPFLQSQIGFCSWVSALDLKGDTDGWKSWAFVVQIVVTMTSLVLLMLYNAAXNTVLYMYCRAMNGELTMEIAKEFAREYXSLPFDNEKVPHVVSVAHA

SEQ ID NO: 142 - DNA, 2124 bp, Malus x domestica
atggaggctgctttgggaaagtctaatagccatggaggatcagaaagggaagagaagacagtagttcttgaatctagtagtattgcagatgatcaagaagctggttccagagaagaaattgttctcaaagttggaaatggaaggccatgccaggagaataatgaagtgaaatcatcttcacctaaacaaaaagatttgagttgcaagcaggggtcctcggcggaacctgatcattcagcrgcatctacttcaccaagtataaaggaaaaggattgtcagcttgaatctgcaagagccgaaatgggtgaagttcgagaagaaaaccaaaggctgaagaagtacttagatcggataacggaggagtaccagacacttcaaatgcagttatatgacattcaacaaaaagcaaacaagtccaaggacattgcaattccaagtactaataagaattatgatcaagatgaggaatccgagcttgtgtcactcagcctcggatcattttcgggcaaacctaaatggaatcaaaagaatgataaaaaccctagcactagtcaagggaaagtagaaaatgagtcagatggagaaagcttgtctttggggctagactgcaaatatgaagcacctaaatcaagtgctacaactgatcaagtgcccttggccaatccaagccctcgaagcagccttgaagaagtgcccaaggaagaagctggtgagacttggccaccaagaaaagttctcaagacagtgagatcaagtggtatggaagatgaagttgtgcaacagagcccagccaagaaagctagggtttcagtgagagttagatgtgacaccccaacgatgaatgatggatgccaatggaggaaatatgggcaaaaaattgcaaaaggaaatccatgtcctcgtgcttactaccgttgcaccattgcaccttcgtgtccagtaagaaaacaggtacaaagatgtgcagaggacatgtccatcttaatcaccacctatgaaggaaatcacaatcacccacttccaatgtcagccacagcaatggcttccaccacctctgcagccgcttccatgctattatccggttcatcatcatcaagctccggccacttgaacccatcagctaccgccaccagtactaccgctgcgcacgatcttcatggttacaatttctatctttccgataactcaaaatccagattctacacacccaactcttcactttcgtcttctctcccaacagtcatcttagacctcacttcaaaaccttcatcaacatccaattccatgtcccatttcaacaaattctcttcgtcatcaagttcttcccatcaactttaccctcccacaagcctcaactttggatcaaattctgagtccagcaccaacatgtcttggagtaataatgggctccttccctatgggacccacttacctccatacaatatcagtaacaagaatcaaagtgcgccactaagtagtcttggaatcaggcagcagcmcatgcaaaacaacatctaccaaaactacatgcagaagaatatcaaccctcaccctaatcctcctcaaggagttcctcatcaatttcaaccagactctattgcagctgccaccaaggcaatcacatctgaccctagctttcaatccgccttagccgccgcgctcacatcaatcattggcagcaacagtactgttgggaccactggcattgctggaaccctaggtcatattaatcaagcaggtggtggrgacagtagtatcagtctggctcagaaattcaaatggaatgaccactttccaggaagtactactactactacatcttcttcttcaccattccttcaatcacagatagggttctgcagttgggtttcggcattggatttgaagggggatactgatgggtggaagagctgggcgtttgtggtgcaaattgtggtgacaatgacttctctcgtgttgytgatgctctacaatgccgctgcraatacggtgttgtatatgtattgccgggctatgaatggtgagcttaccatggaaattgcaaaggagtttgcgagggagtatrtgagcttgcccttcgacaacgaaaaagttcctcatgttgtttcggttgcacatgcttga

SEQ ID NO: 143 - protein, 707 aa, Malus x domestica
  misc_feature (80)..(80): Xaa can be any naturally occurring amino acid
  misc_feature (500)..(500): Xaa can be any naturally occurring amino acid
  misc_feature (582)..(582): Xaa can be any naturally occurring amino acid
  misc_feature (654)..(654): Xaa can be any naturally occurring amino acid
  misc_feature (661)..(661): Xaa can be any naturally occurring amino acid
  misc_feature (689)..(689): Xaa can be any naturally occurring amino acid
MEAALGKSNSHGGSEREEKTVVLESSSIADDQEAGSREEIVLKVGNGRPCQENNEVKSSSPKQKDLSCKQGSSAEPDHSXASTSPSIKEKDCQLESARAEMGEVREENQRLKKYLDRITEEYQTLQMQLYDIQQKANKSKDIAIPSTNKNYDQDEESELVSLSLGSFSGKPKWNQKNDKNPSTSQGKVENESDGESLSLGLDCKYEAPKSSATTDQVPLANPSPRSSLEEVPKEEAGETWPPRKVLKTVRSSGMEDEVVQQSPAKKARVSVRVRCDTPTMNDGCQWRKYGQKIAKGNPCPRAYYRCTIAPSCPVRKQVQRCAEDMSILITTYEGNHNHPLPMSATAMASTTSAAASMLLSGSSSSSSGHLNPSATATSTTAAHDLHGYNFYLSDNSKSRFYTPNSSLSSSLPTVILDLTSKPSSTSNSMSHFNKFSSSSSSSHQLYPPTSLNFGSNSESSTNMSWSNNGLLPYGTHLPPYNISNKNQSAPLSSLGIRQQXMQNNIYQNYMQKNINPHPNPPQGVPHQFQPDSIAAATKAITSDPSFQSALAAALTSIIGSNSTVGTTGIAGTLGHINQAGGXDSSISLAQKFKWNDHFPGSTTTTTSSSSPFLQSQIGFCSWVSALDLKGDTDGWKSWAFVVQIVVTMTSLVLXMLYNAAXNTVLYMYCRAMNGELTMEIAKEFAREYXSLPFDNEKVPHVVSVAHA

SEQ ID NO: 144 - DNA, 1368 bp, Malus x domestica
atgagaatgccaaactccaacagcagatcatctgcagaaaagaaagttgatcaatctgttggatatcaggaggttcacaggcgggttttaagaaaggggagtgaactggatgatgccaaagctgaaatgggagaggtgcgagaagaaaacgctaggttaaaaatgacgttaaatcatatacagaaggattaccagtctctccagctgcggtttttcgacatcctcagacaagaggcttccaaaaacgctgtaaatgttgccggtgatcgaataatcgaagaaccagagcagctcttgtctctttgtcttggaagaagtccaagggagcctacaagtgatcgtgaaactactaccagcagcaacttcacaaaactagtacaggttgatgatggtgaagataacttgaaggccaatcttactcttggattaggttctaatgagactagtttggaggaacctaataaggatcgtgcagaagctggaagtggagacgcaacgtctccattgagtaagacgccgaagacgatgagaaatgaagacggtgaacctccaacgcaggtcaatgcaaaacgagctagggtttctgtgagaactagatgtgataccccaacgatgaatgatggttgccaatggagaaaatatggacagaagatttcaaaaggaaatccatgcccacgagcgtactatcggtgcacagttgcaccagcatgccctgtgagaaagcaggtgcaaagatgctatgaggatatgtctatcttaatcaccacctatgaaggaactcacaaccacccgcttccattcacagccacttacttggcttccaccacctctgccgcggcttccatgctattgtccggctcttgtacatctcacccgggtttcagtaccacatccaccctactcaatggatcagaatttagtgccttcgataacacaagaacacaactctacatgcccaaatcttcccaacctttgctccccacaatcactctcgacctcactgcctctccaccctcttctagcacatttccttcaagtctaagcttttgttccccatcagattccaacatattccccacaagttgggacaatggatacctcaaacatggcttgcaccagttcgacaaagctcaagttggatccttcaatcttggaaagccatcgcaagagtatttccaccaaaattatgcagaaatkatccaccaagcttcttcccaggtgtccttgacagaatcattaaccaaggcaatcacgtccaacccgaatttcaagtcggtaattgcattagcactttcatctatggtcggaagtggaggtggtgccactcataggaaccaaggcgagagtggcgaaagaatcaacacttga

SEQ ID NO: 145 - protein, 455 aa, Malus x domestica
  misc_feature (399)..(399): Xaa can be any naturally occurring amino acid
MRMPNSNSRSSAEKKVDQSVGYQEVHRRVLRKGSELDDAKAEMGEVREENARLKMTLNHIQKDYQSLQLRFFDILRQEASKNAVNVAGDRIIEEPEQLLSLCLGRSPREPTSDRETTTSSNFTKLVQVDDGEDNLKANLTLGLGSNETSLEEPNKDRAEAGSGDATSPLSKTPKTMRNEDGEPPTQVNAKRARVSVRTRCDTPTMNDGCQWRKYGQKISKGNPCPRAYYRCTVAPACPVRKQVQRCYEDMSILITTYEGTHNHPLPFTATYLASTTSAAASMLLSGSCTSHPGFSTTSTLLNGSEFSAFDNTRTQLYMPKSSQPLLPTITLDLTASPPSSSTFPSSLSFCSPSDSNIFPTSWDNGYLKHGLHQFDKAQVGSFNLGKPSQEYFHQNYAEXIHQASSQVSLTESLTKAITSNPNFKSVIALALSSMVGSGGGATHRNQGESGERINT

SEQ ID NO: 146 - DNA, 1776 bp, Manihot esculenta
atgtcttctcctttgctcaagaaaaagattgggtgggataagagaacacccaccaaacaaacagtaattcctgcaaaggataagaatgaaagatccaccacggaaactgattcaaaggcatcatcttctatgcaaaaggaacaagatagttcgcttaaagcagttagagctgaaatgggagaggtgagagaagaaaataaaaggctgaaaatgcacttgggtcaaatgatgaaggactaccaagcccttcatatgaaattctatgacattatccaacaagatgaaacaaagaaatctacctctacagttgataacagtcatcaagcatttgaagaacccgagcttgtttcccttagcctagggagattttcaagtgaatctaaaaatgatggaaaaagcaaaacttacagccatgggaaagatgaagaagatgagaaagctaataatgaaggtgatttgtctcttcgactagactgcaagtttgaagtgtccaaatttcgtaatgcgaatgaaactttgccgaatccaagtagccctgtgaacatttttaaagataaaccaaaggaagaagttgaggaaacttggccgccacctaaggttcttaagacaatgccaagtggaggagaagacgaagttgcgcaacaatgccctctcaagaaagctagggtttatgtgagaatgagatgtgatacccctacgatgaatgatggctgccaatggaggaaatatggacagaaaattgctaaaggaaacccatgtccacgagcatactatcgttgcactcttgcatcatcttgcccagtaagaaaacaggttcaaagatgtgctgaagatatgtctattttaatcactagctatgaaggaacgcacaaccacccacttcctctttcagccacgtttatggcatccaccacttcctctgctgcttcaatgctgttgtctgggtcattatcatccagctttcgaaccaaccccaacccatcagccacctccagctctacttctgctgaccttcatggactaaacttttatctggcaaaagactcgaattcaaatcaattctacttgcacaattcttcactttcagcttcaccttcgcactcaacgatcactattgacctaacttcaaacccctcttcatctcaattcaataggtttaattcaagctatgctccaaacccaaaatttgctcccgctagtcttaacttcagctcttctgaatcaaatgtgataccctggggtaacggtcttctcatccatggtagtacatctcaactctatagcaggaaccaacttggaaagttaaaccttggtggtagaccaccaatggaacatagcctttttcaaccatacatgcagcagaaaaccccagttactagtcagcagccattaccagatactatagccgccgcaaccaaggcaattacaacagatccaagttttcaatcagctttagtagctgccctcaaatccatcattggcaacgagagtggcagtgacaatggcggcagtagtgatggtgcaagtatgggcggaggggatcacttagcccagaagttgaagtggggagagcactttcctttggctagtggttacttacacttatcatcaccaacgcctaaaggtaataaaattgcatgtacaacaagctacttaaacaaaacgacttcagcaaattctcaacctgaaagtatgtttctgccaacttcattgcctttcccttcccctaagagcgcgtctgcatttcctggggacgacagggaccactccaattaa

SEQ ID NO: 147 - protein, 591 aa, Manihot esculenta
MSSPLLKKKIGWDKRTPTKQTVIPAKDKNERSTTETDSKASSSMQKEQDSSLKAVRAEMGEVREENKRLKMHLGQMMKDYQALHMKFYDIIQQDETKKSTSTVDNSHQAFEEPELVSLSLGRFSSESKNDGKSKTYSHGKDEEDEKANNEGDLSLRLDCKFEVSKFRNANETLPNPSSPVNIFKDKPKEEVEETWPPPKVLKTMPSGGEDEVAQQCPLKKARVYVRMRCDTPTMNDGCQWRKYGQKIAKGNPCPRAYYRCTLASSCPVRKQVQRCAEDMSILITSYEGTHNHPLPLSATFMASTTSSAASMLLSGSLSSSFRTNPNPSATSSSTSADLHGLNFYLAKDSNSNQFYLHNSSLSASPSHSTITIDLTSNPSSSQFNRFNSSYAPNPKFAPASLNFSSSESNVIPWGNGLLIHGSTSQLYSRNQLGKLNLGGRPPMEHSLFQPYMQQKTPVTSQQPLPDTIAAATKAITTDPSFQSALVAALKSIIGNESGSDNGGSSDGASMGGGDHLAQKLKWGEHFPLASGYLHLSSPTPKGNKIACTTSYLNKTTSANSQPESMFLPTSLPFPSPKSASAFPGDDRDHSN

SEQ ID NO: 148 - DNA, 1587 bp, Manihot esculenta
atggataattctgctgctcttcctccattgattacccataaagatgggtcgattcaagactctgatattaaggaggacgtactcgagtctgcaaaagctgaaatgggtgaggtaagagaagaaaacgaaagattgaagatgatgttacagcaagttgaaaaagattaccaatcactcaaattacgcttcttcgacatccttcgccaagaaacttgcaagaaaccagcagattcagccccatcaagcgacgaaaccgaagagcctgagctcgtctcactttgtcttggaagaactcccagcgaacctaaacgagatgagaagacaagcaactctagcaaaagcagcagagaaaatgaagagttaaaggctagcttgactcttgggttcgagtccaaatttcagacatctactgagcttgtgtcgaatcctagccctgagaatagtttagaagatttagccaaagaagatgaagctgcaggagagacatggccaccaagcaaggtccttaagagaaatgcagatgatgaggttgctcaacaaaacaatgtgaaaagagctagggtttgtgtgagagctagatgcgatactccaacgatgaatgatggatgccaatggaggaaatatggccaaaagattgcaaaaggaaatccatgtcctcgagcatattatcgttgtacagtcgcaccagcatgtccagtaagaaaacaggtacaaagatgtgctgaggacatgtccatcttgattacaacctacgaaggaactcacaaccacccacttcctgtttcagccacagccatggcttcaacaacctcagcagcagcttccatgttattatcaggctcttcatcctcacagccagcctttggctcccatgctgctgcaacaacaacaactgctactcaactcaatggcttaagcttcagtctctacgatagttccacaccaaaacaattctacttagcaaataactcttcatcacctttgttcccgacaattaccttggatcttacagcttctccctccacttcatctactgcaactcctttcaataatagattctcttcaagcatctctagattcccttcaacaaatcttaacttttgttcctcggaatccaacatagtatcagaagtttggggaaatgggtaccaaactaggaagcaactccaagaacaaatatatgaaaagaatcaccagaaccaagcagcttctcaacaggaactgacagaaaccttaaccaaagcaataacatctgatccaagtttcagaactgtaatagctgcagctatttcctcaatgatgggaggcggcggcggatctgcaaattcaagccaaggaaacctaaggggtgcagagagttttggtcagaatttgaagctgggagaaggtaataatcaggccattgctgcaaatttattgaacctgcagaacgggaaaggatgtgcaagcagctacttcaatggcttgtcggcttcaacttcccaaatgggaagcttgcttcaatctcatgcattgccgttttctgtgtttaatagttcctccatgtctgctaataataacaataacaataaggatcataagagttga

SEQ ID NO: 149 - protein, 528 aa, Manihot esculenta
MDNSAALPPLITHKDGSIQDSDIKEDVLESAKAEMGEVREENERLKMMLQQVEKDYQSLKLRFFDILRQETCKKPADSAPSSDETEEPELVSLCLGRTPSEPKRDEKTSNSSKSSRENEELKASLTLGFESKFQTSTELVSNPSPENSLEDLAKEDEAAGETWPPSKVLKRNADDEVAQQNNVKRARVCVRARCDTPTMNDGCQWRKYGQKIAKGNPCPRAYYRCTVAPACPVRKQVQRCAEDMSILITTYEGTHNHPLPVSATAMASTTSAAASMLLSGSSSSQPAFGSHAAATTTTATQLNGLSFSLYDSSTPKQFYLANNSSSPLFPTITLDLTASPSTSSTATPFNNRFSSSISRFPSTNLNFCSSESNIVSEVWGNGYQTRKQLQEQIYEKNHQNQAASQQELTETLTKAITSDPSFRTVIAAAISSMMGGGGGSANSSQGNLRGAESFGQNLKLGEGNNQAIAANLLNLQNGKGCASSYFNGLSASTSQMGSLLQSHALPFSVFNSSSMSANNNNNNKDHKS

SEQ ID NO: 150 - DNA, 1662 bp, Manihot esculenta
gtagatgtcgcaaatgataagaaggaaagatccaccctggaatctgattcaaaagcgtcttcttccagccaaaagaaacaggataattggcttgaatcaaccagagctgaaatgggagaagtgagagaagaaaatcaaaggctgagaatgtatttgggtcaactgatgaaggattaccaagcccttcaaattaaattttataacactatccaacaagaaaaaacaaagaaatctacctcagcagttgataccagtcatcaagtagttgaagaagacgaccttgtttcccttagtctagggagattttcaagtaaatccataaaggatcaaaagagcaaaatttatagcaatgggaaagacgatgagccggctactaatgaaggtcatttgtctcttggactagactgcaagtttaaagtctccatatctcataatgcagatggtgaacttttggccaatccaacaagtccggtgaacagctctgaagatcaacaaaaggaagaagctgggaagatgatcaaggcaatgccaagtggaggagatgatgaaatggtgcaacagaaccctcttaagaaagctagggttagtgtgagaactagatgtgatactccaacgatgaacgacggatgccagtggaggaaatatggacagaaaattgcaaaaggaaacccatgcccacgagcttactatcgttgcactattacaccatcttgtccagtaaggaaacaggttcaaagatgcgctgaggatgtatccattttaatcaccacctatgaaggaacacacaaccacccacttcctctttccgccacggctatggcttccgccacctctgctgctgcttcaatgctgttgtctgggtcagcatcatcaagttctcgaaccggccccaacccttcagcgatctccagcaccactgctgctgaccttcatggactaaacttttgcctatcagataactcaatgtcgaagcaattctacttgcacaactcttcactttcagcttcaccttcgcacccaacaatcactctcgacctaacttcaaatccatctccatctccatctcaattcaatagattttcttccagttatgctccaatactaaaatccgctcccgccggtctatacttcagctctgacatacctaatgcggcgccctggggcaatgggctccttagctacggtagtgcttcacaaccctacaacaggaccctacaaggaactttaaacgtaagtggtagaccacccatagaaggtagccattttcaaccctacatgcagaagaaaaccgaatctagtcttcagcagccattaccggataccatagctgccgcaaccgaggtgataacctcagaccctagtttccaatcagctctagcgggagctttgatatctatcattggcagtggtagtacaaatgtgggcggagtggataactttgcccagaagttgaagttgggtgaacactttcctgtggctagtggttgctcatcatcgccaacaactaaagccagtattgcatgtgcaacaagctacttgaataagacgacttcagcaaattctcaacctgctaatttgatgtttctgccaccttcactgtctttcccttctacaaagagcgcatctgcatctcctgcggacaacagagacacccccaaataa

SEQ ID NO: 151 - protein, 553 aa, Manihot esculenta
VDVANDKKERSTLESDSKASSSSQKKQDNWLESTRAEMGEVREENQRLRMYLGQLMKDYQALQIKFYNTIQQEKTKKSTSAVDTSHQVVEEDDLVSLSLGRFSSKSIKDQKSKIYSNGKDDEPATNEGHLSLGLDCKFKVSISHNADGELLANPTSPVNSSEDQQKEEAGKMIKAMPSGGDDEMVQQNPLKKARVSVRTRCDTPTMNDGCQWRKYGQKIAKGNPCPRAYYRCTITPSCPVRKQVQRCAEDVSILITTYEGTHNHPLPLSATAMASATSAAASMLLSGSASSSSRTGPNPSAISSTTAADLHGLNFCLSDNSMSKQFYLHNSSLSASPSHPTITLDLTSNPSPSPSQFNRFSSSYAPILKSAPAGLYFSSDIPNAAPWGNGLLSYGSASQPYNRTLQGTLNVSGRPPIEGSHFQPYMQKKTESSLQQPLPDTIAAATEVITSDPSFQSALAGALISIIGSGSTNVGGVDNFAQKLKLGEHFPVASGCSSSPTTKASIACATSYLNKTTSANSQPANLMFLPPSLSFPSTKSASASPADNRDTPK

SEQ ID NO: 152 - DNA, 1746 bp, Medicago truncatula
atgtcgagtcctagcagttcagagattgaagagaaaagagttacttcaattattcatgaagttgttgaagttgattgctctactgaacaagaggttacaaaggaagacaaaccaaaatgttctaaagaggagatgggtgaggtgaaagaagaaaacgaaagattgaagacgatgctatcgcgagttgaaaaagattacaattcccttcaactccgtttctttgacatcgttaacaaagacgtttctatgaaagatatagaagattcatcaactaattcacacgaagaaatcgatgaagaacccgagtttgtgtcactttgccttggaagaagtccaaatgagtataagaaagatgcaaaaaacattgaaaaccctaacaaacctaaagagaaagaagatatggaagttaacctaagtcttggattagactctaaatatatggttccaatggagttagtatctgatttgagtccaatgaatagctcagaagaattaccaaaggaagttgaagttgaagaaaaaggagcaatattttcaacaaataaatcaacaaaagtgataaatgtaaatgatgagatttcagaactattgcctgctaaaagagtcagagtttctgtgagagctaaatgtgatactcccacgatgaatgatggatgtcaatggaggaaatatggacaaaagatagcaaaaggaaatccatgtccaagagcttactatcgttgtacagttgcaccagcttgcccagttaggaaacaggtccaaagatgtgctgatgacatgtccatcttaatcacaacatatgaaggaacacacaatcaccctcttcaagtaacagcatcagccatggcatacacaacttcagctgcagcttcaatgatggtatcaggttcatcaacatcatcatcatcatcacatcaaaatcaaaatatccatcacaacaattccacatcttttggaaattcaccaacacaaatcaatggtctaaatttcaatcatcaccaatttgaacaatcaagaacaccaaaacaacatttcttcattccaccaaaccataataatttgtttccaacaatcactcttgacctaacttctccttcatccttatcatcatcaaacataccttcaaatgttccgagattttcgccaaataatcttagtttttgttccacacaacaaccaaatttcacaccaatatcatccatttggaacaatagtaacaataaattagggtttattaacaataacacaaaccctaatattgaaaaaactcaagttaggccttttaatcatttccaagaaaatttctatcaaaatcaaaattgcatgacaagttatcaaaccccttcaagacaagctttggctgaaacaataagcaaagcaattagcactgatccaagtcttcattcagttatagctgctgcagtttcgtcgattgtaggacaaggatcaaacaatggtggaaagcaagaagaaaatagagagaatggtttaggtgcagggttgaatttgaaacttggtgagtatcctcaaatggtttcaaacaatttgttgaatcaaaatggtaagggatgcttgaagggttcatacttcaaaagattgtcaccaacaacaagttcacaggctaaaaatttcatgcttcttcaaccttcattgccattttctgtttctaagagcagtgctagtaaacctccatccattgttaacaatatcaacaattttgatctagataagaacaaacataattaa

SEQ ID NO: 153 - protein, 581 aa, Medicago truncatula
MSSPSSSEIEEKRVTSIIHEVVEVDCSTEQEVTKEDKPKCSKEEMGEVKEENERLKTMLSRVEKDYNSLQLRFFDIVNKDVSMKDIEDSSTNSHEEIDEEPEFVSLCLGRSPNEYKKDAKNIENPNKPKEKEDMEVNLSLGLDSKYMVPMELVSDLSPMNSSEELPKEVEVEEKGAIFSTNKSTKVINVNDEISELLPAKRVRVSVRAKCDTPTMNDGCQWRKYGQKIAKGNPCPRAYYRCTVAPACPVRKQVQRCADDMSILITTYEGTHNHPLQVTASAMAYTTSAAASMMVSGSSTSSSSSHQNQNIHHNNSTSFGNSPTQINGLNFNHHQFEQSRTPKQHFFIPPNHNNLFPTITLDLTSPSSLSSSNIPSNVPRFSPNNLSFCSTQQPNFTPISSIWNNSNNKLGFINNNTNPNIEKTQVRPFNHFQENFYQNQNCMTSYQTPSRQALAETISKAISTDPSLHSVIAAAVSSIVGQGSNNGGKQEENRENGLGAGLNLKLGEYPQMVSNNLLNQNGKGCLKGSYFKRLSPTTSSQAKNFMLLQPSLPFSVSKSSASKPPSIVNNINNFDLDKNKHN

SEQ ID NO: 154 - DNA, 1842 bp, Medicago truncatula
atggagtgcagttctgggagatctggtgatggagatagtggactcaaagatgataagagaagtgagcatagtactggtgatgatcatgaaagtcatcatcataaaaaggagattattgctgaggaagcacccattgctagtacagaaagatcaattgaggctggtccaagcacaatatcctcgcccaaaaatgataaggttgatgaacagcttgagacaacaaaagctcaaatgggtgaggtgagagaagaaaatcaacggttaaagatgtgcttgaacaaaataatgactgaataccgagcactggaaatgcaatttaacaatatggttaagcaagaaacaaaaaagaacaatgataataaccatgaagaaatgaatgcagaatcagatcttgtttctctcagtcttggaagagttcctagtaacaatattccaaaaaatgatcaagagaaagttaacaaagtgtctaaactagcattgaataatgatgaagaattcaataaggaagagttgtcacttggattggaatgtaaatttgaaacatcaaaatcaggtagcacaactgaagggttaccaaatattccaagtccagtgaatagttctgaagttgttccaataaagaatgatgaagttgtggagacttggccaccaagtaagacactcaataagacaatgagagatgctgaggatgaagttgctcaacaaactcctgcaaagaaagctagagtttgtgttagagcaagatgtgacaccccaacgatgaatgatggatgccaatggaggaagtatggacaaaaaattgcaaagggaaatccttgccctcgagcttactatcgctgcacagttgcaccatcatgtccagttagaaaacaggtacaaagatgtgttgaggacatgtctattctaatcacaacatacgaagggacacacaaccacagccttccactttcagcaacagcaatggcttccacaacttccgcggccgcatcgatgctattatcaggttcatcaacctcaaactctggttcaatgccatcagcacaaaccaacaataatcttcatggcctaaacttttatctaccagatggtacaaaatcaaatcaattatacctatccaaccctgcactatcatctcaacattcacatccaactatcactcttgacctcacttcaaacccatcaaattcttcaacatcatcaccctttgttagattcaattcaagctacaacaacaataaccaactaccaagatacccttcttccactcttagctttagttctcctgaatcaaatcccatgcattggaatagcttcctcaactatgctactactcaaaatcaaccatatagtaataataggaacaataataacctaagcactttaaactttggtagacaaaacacaatggaaagtatataccaaacctacatgcaaaaaaacaacaatagttcaaacatttcacaacatgtaggtttacaagatagtactatatctgcagcaacaaaagctatcacagcagatccaacttttcaatcagctttagctgcagcactttcttcgcttatcggaaacaccaccaatcaagggaatcaaaatcaaagtgcaggagaaaatttgagtcagaaaatgaaatgggctgagatgtttcaagtttcttctacttcattgccttcatcaagttctaaagtaaatggttgtgcttcaagtttcttgaacaaaacggcaccggtgaacaatacacagaatggaagtttgatgttgttgtctccttctttgccattttctgcaactaaaagtgcttctacatctcctggtggtgataatagtgacaacaccaattaa

SEQ ID NO: 155 - protein, 613 aa, Medicago truncatula; identical to SEQ ID NO: 103

SEQ ID NO: 156 - DNA, 1584 bp, Oryza sativa
atgggtgaagtacgagaagagaacgagaggctcaagacgttgctgtcgcgcatctcacacgactatagatctcttcagacgcacttctatgacgttcttcagcaaggccgagctaagaagctcccagactctccggccaccgacatcgaggagcctgaactcgtctctctgagacttggaacgagcacgagcaaatgcaagaaggaagacaagagtaccaccagtagcgaagtcaaagggagtactgaagattttctgaagatcaaaggaggtctctctcttggattatcagactgcagagttgatgctaataacagtgagaaggtacagccggatgtgatgacgttgagccctgaaggcagctttgaggatgctagggatgacaccgcagagaccacagagcaatggccaccaagcaaaatgctgaagaatttgaggagcgtcggcgcggaagccgaggatgacatagctcctcagccacaggtcaagaaggctagggtttcagtgagagcgagatgtgatgcgccaacgatgaatgatggatgccagtggagaaagtatgggcagaagattgcgaaggggaacccgtgcccgcgcgcctactaccggtgcaccgtggcagcaggatgcccagtcaggaagcaggtgcagcgatgcgcggatgacatgtccatcctcatcaccacctacgagggcacgcacaaccacccgctctccgtctccgccaccgccatggcctccaccacctccgccgccgcctccatgctcatctccggctcctcctccacctctctcgccgcctaccccgccgccgccgcgtcgccggccctcgcattcgacgcctcctccaagccgcccctcatcggcggccgcccgttcttcctcccgaccgccgccgccgccgccatcacctccaccccttcctaccccaccatcaccctcgacctcacctcgccggccgccgccgccacctcctcccacgccgccttctccctcagtaacaggttctcgcacaccaggtacccttccaccggcttcaccttctccggctccggcccgagtagcgcgccatggccggggtacttgagctacggggcgtcgctatccgctcacccgtacaacgccggcggcggcaagagctcgtcgtcgttcgaggctgcgctgagcagcatcaacggaagcaggcagcagggcggcggcggcggtggcggctcggcgccgccgctctaccagatgcagcagaaggcggcggcggcggcgccgccgccgccgagcgtgatcaccgacacgatcgcgaaggcgatcacggcggacccgagcttccacacggcgctggcggccgccatcacgtcgtacgtcggcaagaagggctcgccgccggcgtcgggaggagaggacagcaaggtcgggctcaagtggggggagcacctcgggctcgggctgacccactcgtcgctgtcgacggcggcggcggcggcggcgagctcgagcagccagatgttcttgcagccatcgctggggttatcaggatcgacgacgagtgcgtcgacgtctcctgtggcgaacagagagcaagcacattaa

SEQ ID NO: 157 - protein, 527 aa, Oryza sativa
MGEVREENERLKTLLSRISHDYRSLQTHFYDVLQQGRAKKLPDSPATDIEEPELVSLRLGTSTSKCKKEDKSTTSSEVKGSTEDFLKIKGGLSLGLSDCRVDANNSEKVQPDVMTLSPEGSFEDARDDTAETTEQWPPSKMLKNLRSVGAEAEDDIAPQPQVKKARVSVRARCDAPTMNDGCQWRKYGQKIAKGNPCPRAYYRCTVAAGCPVRKQVQRCADDMSILITTYEGTHNHPLSVSATAMASTTSAAASMLISGSSSTSLAAYPAAAASPALAFDASSKPPLIGGRPFFLPTAAAAAITSTPSYPTITLDLTSPAAAATSSHAAFSLSNRFSHTRYPSTGFTFSGSGPSSAPWPGYLSYGASLSAHPYNAGGGKSSSSFEAALSSINGSRQQGGGGGGGSAPPLYQMQQKAAAAAPPPPSVITDTIAKAITADPSFHTALAAAITSYVGKKGSPPASGGEDSKVGLKWGEHLGLGLTHSSLSTAAAAAASSSSQMFLQPSLGLSGSTTSASTSPVANREQAH

SEQ ID NO: 158 - DNA, 1941 bp, Oryza sativa
atggaacaaaaggaagaagagaaggagctgaaggcagacaagaacttgagaagaagaggagaggagatgatcaagggagactcaaagcagctagcttctatgtacatgaaagaggagatgatcaagggagagaggcagcttggaacccatgaagatcggttaaaagacgaggttataaaagatggcgataaaatttcagatggcaattttttcaagtccttgcaaaacatatcaagcacaaaggaggaggtgtgttcaccaggcccaatagaaagatcatgtatggactcatcattgctaaacatgaaagctcaaaataagggtcaggatgataagcttgaatcaacaagggcagaaatgggtgaagtacgagaagagaacgagaggctcaagacgttgctgtcgcgcatctcacacgactatagatctcttcagacgcacttctatgacgttcttcagcaaggccgagctaagaagctcccagactctccggccaccgacatcgaggagcctgaattcgtctctctgagacttggaacgagcacgagcaaatgcaagaaggaagacaagagtaccaccagtagcgaagtcaaagggagtactgaagattttctgaagatcaaaggaggtctctctcttggattatcagactgcagagttgatgctaataacagtgagaaggtacagccggatgtgatgacgttgagccctgaaggcagctttgaggatgctagggatgacaccgcagagaccacagagcaatggccaccaagcaaaatgctgaagaatttgaggagcgtcggcgcggaagccgaggatgacatagctcctcagccacaggtcaagaaggctagggtttcagtgagagcgagatgtgatgcgccaacgatgaatgatggatgccagtggagaaagtatgggcagaagattgcgaaggggaacccgtgcccgcgcgcctactaccggtgcaccgtggcagcaggatgcccagtcaggaagcaggtgcagcgatgcgcggatgacatgtccatcctcatcaccacctacgagggcacgcacaaccacccgctctccgtctccgccaccgccatggcctccaccacctccgccgccgcctccatgctcatctccggctcctcctccacctctctcgccgcctaccccgccgccgccgcgtcgccggccctcgcattcgacgcctcctccaagccgcccctcatcggcggccgcccgttcttcctcccgaccgccgccgccgccgccatcacctccaccccttcctaccccaccatcaccctcgacctcacctcgccggccgccgccgccacctcctcccacgccgccttctccctcagtaacaggttctcgcacaccaggtacccttccaccggcttcaccttctccggctccggcccgagtagcgcgccatggccggggtacttgagctacggggcgtcgctatccgctcacccgtacaacgccggcggcggcaagagctcgtcgtcgttcgaggctgcgctgagcagcatcaacggaagcaggcagcagggcggcggcggcggtggcggctcggcgccgccgctctaccagatgcagcagaaggcggcggcggcggcgccgccgccgccgagcgtgatcaccgacacgatcgcgaaggcgatcacggcggacccgagcttccacacggcgctggcggccgccatcacgtcgtacgtcggcaagaagggctcgccgccggcgtcgggaggagaggacagcaaggtcgggctcaagtggggggagcacctcgggctcgggctgacccactcgtcgctgtcgacggcggcggcggcggcggcgagctcgagcagccagatgttcttgcagccatcgctggggttatcaggatcgacgacgagtgcgtcgacgtctcctgtggcgaacagagagcaagcacattaa

SEQ ID NO: 159 - protein, 646 aa, Oryza sativa
MEQKEEEKELKADKNLRRRGEEMIKGDSKQLASMYMKEEMIKGERQLGTHEDRLKDEVIKDGDKISDGNFFKSLQNISSTKEEVCSPGPIERSCMDSSLLNMKAQNKGQDDKLESTRAEMGEVREENERLKTLLSRISHDYRSLQTHFYDVLQQGRAKKLPDSPATDIEEPEFVSLRLGTSTSKCKKEDKSTTSSEVKGSTEDFLKIKGGLSLGLSDCRVDANNSEKVQPDVMTLSPEGSFEDARDDTAETTEQWPPSKMLKNLRSVGAEAEDDIAPQPQVKKARVSVRARCDAPTMNDGCQWRKYGQKIAKGNPCPRAYYRCTVAAGCPVRKQVQRCADDMSILITTYEGTHNHPLSVSATAMASTTSAAASMLISGSSSTSLAAYPAAAASPALAFDASSKPPLIGGRPFFLPTAAAAAITSTPSYPTITLDLTSPAAAATSSHAAFSLSNRFSHTRYPSTGFTFSGSGPSSAPWPGYLSYGASLSAHPYNAGGGKSSSSFEAALSSINGSRQQGGGGGGGSAPPLYQMQQKAAAAAPPPPSVITDTIAKAITADPSFHTALAAAITSYVGKKGSPPASGGEDSKVGLKWGEHLGLGLTHSSLSTAAAAAASSSSQMFLQPSLGLSGSTTSASTSPVANREQAH

SEQ ID NO: 160 - DNA, 1698 bp, Populus trichocarpa
atgcttaaacaggtgattgtagcgactaaaaatgaaagaatcaccacggaagctgatgcaaaagaatcttcctgccaaaaggaacaggatgatcagcttgaatctgcaagagctgagatgggtgaagtaagaaaagaaaatcaaaggctaaaaatacatttggatcgtgtagtgaaggattatcggacccttcaagtgcaattctatgagattattcagcaagaagaaactaagaaatctacagatactgtcgatgatcatcaaggaactgaagaacacgagctcgtgtcgcttacccttggaagaatttcgagtgaacctaaacgggatggaaagaacaataaaacttctagccaggggaaaaatcacgatgagcaagttaaagaaagcctctctcttggatcactctgcacatttgaagcgtctaaatctgctaccaatgagactttgccgaatccaagccccgtgaacagttttggtgagccaaaggaagaagccggggagacttggccacccagtaaagctctcaagacaatgcgaggaggagatgatgaagttccccagcaaaaccctgcaaagaaagctagggtttctgtcagagctagatgcgataccccaacgatgaatgacgggtgccaatggagaaaatatgggcaaaaaattgccaaagggaacccatgtcctcgagcatactatcgctgcactgttgcaccatcatgcccagtacggaaacaggtacaaagatgtgctgaagatatgtccatcttaaccaccacctatgaaggaacgcacaaccacccacttcctatttctgccacggctatggcttctacaacttctgcagctgcttccatgttactgtctggctcatcatcgagctctgcaggaactgcaggtttcaataactccggcaccatcgccgttgacctccatggactaaactactatctatccgataactcaaaatcaaagcaattctacttgcacaactcttcactgtcatcttcatctccataccctacaatcactcttgacctcacttcaaacccatccagtgcttcatctcatttcaatagatttactacttcaagctaccggcctaccattcaaaaatttgcttcaacaagcctcaactttggctcctctgattcgtctaacgcaatgccttggggcaatggtttcctcactgcttccggccagtctcacaacaggattaaccaacttggaactttaaacattggaagaccagctatggatcagagtaacatttatgatcagttctacacgcaaaacattaatgacctggcagctgctacttctcagcagtccctgtcagccgataccatagctgctgcaaccaaggcaattacagcagacccaagtttccaatctgctttagcagctgccctcacttctatcattggcactggaactggcagtagcgctactggtgttgcaaatctaggtgttgttaataatttatttccaaagtcggaacggggaccggttattaatagcttctcatcatcacctcctaacggcaatccatgtgcaagctacttcaacaaaacgacgtcttcaataaattctcagccagctccaagttcgatgacaatgtttgtgccaccttcattgccattttctactcctacgaatgcatccgcgtctgctgttgacaagaatgatcgtgccaactga

SEQ ID NO: 161 - protein, 565 aa, Populus trichocarpa
MLKQVIVATKNERITTEADAKESSCQKEQDDQLESARAEMGEVRKENQRLKIHLDRVVKDYRTLQVQFYEIIQQEETKKSTDTVDDHQGTEEHELVSLTLGRISSEPKRDGKNNKTSSQGKNHDEQVKESLSLGSLCTFEASKSATNETLPNPSPVNSFGEPKEEAGETWPPSKALKTMRGGDDEVPQQNPAKKARVSVRARCDTPTMNDGCQWRKYGQKIAKGNPCPRAYYRCTVAPSCPVRKQVQRCAEDMSILTTTYEGTHNHPLPISATAMASTTSAAASMLLSGSSSSSAGTAGFNNSGTIAVDLHGLNYYLSDNSKSKQFYLHNSSLSSSSPYPTITLDLTSNPSSASSHFNRFTTSSYRPTIQKFASTSLNFGSSDSSNAMPWGNGFLTASGQSHNRINQLGTLNIGRPAMDQSNIYDQFYTQNINDLAAATSQQSLSADTIAAATKAITADPSFQSALAAALTSIIGTGTGSSATGVANLGVVNNLFPKSERGPVINSFSSSPPNGNPCASYFNKTTSSINSQPAPSSMTMFVPPSLPFSTPTNASASAVDKNDRAN

SEQ ID NO: 162 - DNA, 1617 bp, Populus trichocarpa
atgtcaagttccggtggtgcagctatagaagaaagggcggtgcaatttggattgactagccgtgaagattcaggcagcagtcaagaggctaagaaggaggaagtaattgaatctgccaaaagcgaaatgggtgatgtgagagaagaaaatcacagattaaagatgatgctggagcgaattgagaaagattaccagtctctccagttgcgctttttcgacattcttcagcacgaaactagttctaagcaatctacagattcagccccatcccatgatgaaactgaagaatctaatgagctggtgtcactttgccttggaagaagtccaagcgagcctaaaaaggaagaaaagtctacaaactctgccaaaagtagggaaaatgaagagttgaaggctaacttgactcttggattggattccaagattctgacatccacagaaactgcgtcaaatccaagccccgcagaaagtgtagaagaaccgaaggaagaagctggagaaacatggccaccaagcaagattattccaaaaagaaatggagatcatgatgaggctgcacaacaaagtcaagcgaaaagagccagggtttgtgtgagaacaagatgtgagacacccacaatgaatgatggatgccagtggaggaaatatggacagaaaatttccaaaggaaatccatgcccacgagcatattatcgttgcactgttgcaccattatgtccagtaagaaaacaggtgcaaagatgtgctgaggacacgtcgatcttgatcactacctatgaaggaacacataaccacccacttccagtttcagccacagccatggcttctaccacctcggcagctgcttcgatgttattatctggctcttcaacctctcagcaaggccttggttcccatatcaatgcgacctctgctcgtactgaactcaacggagtaagcttcagtcttcacgatcatttgagagcaaagcaaatctactttccaaattcttcctcgccaacgttcccaacaattactttagaccttaccacctctccctctacttcaactactcctttcggtaggttctcttcaagcttcagttcaacctcaagatatccctcaacaagtcttaacttttcttccaccgaacccaactctctacccccaatatggggaaacgggctccataattatggcacacgatcctataatcatcaacaattatatcaatcattcatggagaagaaccaccaggccgcagcttctcaacaggttttaacagataccttaacaaaggcaataacgtcggatccaagttttcgaacagtaatcgccacggctatttcatcaatgattggaggtggaggtagtgcaattgcaaacaatagaaaccaaagggccggggatcagaattgttttgggcagaacttgaactttggcgagaccatgactacatcggcattctccatcaattcattgtcccagaacgggaaaggatgtgcatcaagctgtttcaatggattgtcatcttcgacatctcagaagggaagcagtcagcttcaaccggcattgccattttctgtatttaacagtgcctctatgcctaataatgacaatgaggaacacaagagttaa

SEQ ID NO: 163 - protein, 538 aa, Populus trichocarpa
MSSSGGAAIEERAVQFGLTSREDSGSSQEAKKEEVIESAKSEMGDVREENHRLKMMLERIEKDYQSLQLRFFDILQHETSSKQSTDSAPSHDETEESNELVSLCLGRSPSEPKKEEKSTNSAKSRENEELKANLTLGLDSKILTSTETASNPSPAESVEEPKEEAGETWPPSKIIPKRNGDHDEAAQQSQAKRARVCVRTRCETPTMNDGCQWRKYGQKISKGNPCPRAYYRCTVAPLCPVRKQVQRCAEDTSILITTYEGTHNHPLPVSATAMASTTSAAASMLLSGSSTSQQGLGSHINATSARTELNGVSFSLHDHLRAKQIYFPNSSSPTFPTITLDLTTSPSTSTTPFGRFSSSFSSTSRYPSTSLNFSSTEPNSLPPIWGNGLHNYGTRSYNHQQLYQSFMEKNHQAAASQQVLTDTLTKAITSDPSFRTVIATAISSMIGGGGSAIANNRNQRAGDQNCFGQNLNFGETMTTSAFSINSLSQNGKGCASSCFNGLSSSTSQKGSSQLQPALPFSVFNSASMPNNDNEEHKS

SEQ ID NO: 164 - DNA, 1683 bp, Ricinus communis
atgcccaattctggtgctactgttgatttgattagccacgaaggtggtttcagtttacaggttaagaatgataataaggttgagattggaggacatatacaggatcatagcgtgaagccatcttcatccagcaacgagggctcaagcaacagcaaagaggtggatgtcctcgagtctgccaaagcagaaatgggggaagtgagggaagaaaatgaaagattaaagaagatgctaaaacaagtagaaaaagattaccagtctctcatgctgcgcttctttaacatctttcaacaagaaacttgcaagaaatcttcagattcaactccgtctaaccacaacgaaactgaagaacacgagctcgtgtcactttgcctaggaagaactccacctccatgcgagcctaagaaagatgagaagcagtcagggagcaactctagcaaaagttgtagagaagatgaagagttgaaggctaaacttagtcttggtttggacgcgacggagcttgtttcgaatcctagctccgggaatagcttagaagaagtaaaggaagatgaagcaggagagacatggccaccaagtaaggttaatccaaagagaagtatagatgatgaggttgcacagcaaagcaatgtgaaaagagctagggtttgtgtgagagctagatgcgacacaccaacgatgaacgatggatgccaatggaggaaatatggacagaaaatttctaaaggaaatccatgcccgcgagcatactaccgctgcacagttgcaccagcctgccctgttagaaaacaggtgcaacgatgtgctgaggacatgtccatcctgataactacttatgaaggaacccacaatcatccacttcctgtcacagccacagctatggcttccacaacatcagcagctgcttccatgttattatcaggttcttcctcctcacagccaggcgtcacttcccatgccaccttcgcaactcctgctactcatgatcacctcaatggattaaacttcagcctccatgacaattcaagaacaaaacagttctacttagcaaacccttcttcaccattattcccaacaattactttagaccttactacctctccatcatccacttcatctactactcctttcaataggttgttctcttcaacttcatcatcaagatttccatcaacaagtcttaacttttcttccgcagagtccagcatattaccaactgtttggggcaatggataccaaagttataatagtattgggtccttagtgagtagtctaggcaaacaaaaccaccaaatgtatcagcctgcaacagcttctcagcaagctttgacagaaaccttaaccaaggcaataacatctgatccaagcttcaggactgtcatagctgcagcaatttcatcagtgatgggaagcagtacaggtgcaagtgcaagtccaagcaaaggggtggttgcagagagttttggtcagagtttgaagttaggtgagcctaataatcaggcaaattctactattaactcattgacccagaatgggaaaggatcatgtgcatcaagctatttcaacggcttgtcatcttcaacttcccaaatgggaagtctgcttcagtctgcagcattgcctttttctatctttaacagtgcacctacgtctactaataatgacaaggatcataagagttga

SEQ ID NO: 165 - protein, 560 aa, Ricinus communis
MPNSGATVDLISHEGGFSLQVKNDNKVEIGGHIQDHSVKPSSSSNEGSSNSKEVDVLESAKAEMGEVREENERLKKMLKQVEKDYQSLMLRFFNIFQQETCKKSSDSTPSNHNETEEHELVSLCLGRTPPPCEPKKDEKQSGSNSSKSCREDEELKAKLSLGLDATELVSNPSSGNSLEEVKEDEAGETWPPSKVNPKRSIDDEVAQQSNVKRARVCVRARCDTPTMNDGCQWRKYGQKISKGNPCPRAYYRCTVAPACPVRKQVQRCAEDMSILITTYEGTHNHPLPVTATAMASTTSAAASMLLSGSSSSQPGVTSHATFATPATHDHLNGLNFSLHDNSRTKQFYLANPSSPLFPTITLDLTTSPSSTSSTTPFNRLFSSTSSSRFPSTSLNFSSAESSILPTVWGNGYQSYNSIGSLVSSLGKQNHQMYQPATASQQALTETLTKAITSDPSFRTVIAAAISSVMGSSTGASASPSKGVVAESFGQSLKLGEPNNQANSTINSLTQNGKGSCASSYFNGLSSSTSQMGSLLQSAALPFSIFNSAPTSTNNDKDHKS

SEQ ID NO: 166 - DNA, 1956 bp, Ricinus communis
atggaggatcatgccttaatgagaagatctggacatggaggtttgcccaaggaagagataccacctcctgattctagtagtggtgggggtgatgatcaaggttcttgcagagaagatattgttgctaaggttggaaacaaaagaccataccatgagactgatgacatcaagtcatctttatcagaacctaataaagatttaagctggaataagcaggtaggtatagcgacgaacaaggaaagacccaccatggatttttattcaaaagcatcttcttccagcccaaagcaacaggacaattggcttgaatcagcaagagctgaaatggaagaggtgagaaaagaaaatcaaagactgaaattgtacttgggtcaaatgatgaaagattaccaagctcttcaaaagcaattctatgaaattattcaacaagaagaaacaaagaaatctacatctacagtcgataatcatgatcataatcttgatcatcatcaaacagttgaagaacctgagcttgtttcccttagcttagggagattttcaagtgactattctataaaggatggaaagagcaagacttctagccaagggaaagatgataatgagatagctaataatgaaggtctttttcttggactagactgcaaatttgaagtttcggaagtaattaatgggaatgaacagtctttgcgtcctagtcccgtggatagctttgaagaacaacccaaggaagaagatggagagacctggccgcctaaggttctaaagaatactatgccaggtggagaagatgaagctctgcaacagaaccctctcaagaaagctagggtttgtgtgagagctagatgtgatactccaacgatgaatgatggatgccaatggaggaaatatggacagaaaattgcaaagggaaatccatgccctagagcatattatcgctgcactgttgcaccatcttgcccagtaaggaaacaggttcagaggtgtgcagacgatatgaccattttaataaccacgtatgaaggaacacacaaccaccaacttcctctttcagcaacagcaatggcttccaccacttctgcagctgcttctatgctattgtccggttcatcttcgagctctcgaacaggccccaaccactcatcacccaccacaagcatccctgctgatctgcatgggctaaaatttttcctatccaataactcctatgattctaagcaattcaacttgcacaactcttccctttcaacttcaccttcacaccctacaatcactcttgatctaactaattcttcaaacccaccctcatcatcaactttcattaatagaccattttcttcaacgtaccctccagttccaaaatttgctcctcctaatactctaaacttcggttcttctgagtctagtggaatgccttggagcaatgggttctttagctatggaaataatacttctcaaccctacaacaagaacccacttattggaagtttaaacctaggtagatcaatcatggaaaacaacatttttcaatcctacatgcaaaagaaaactccagctactaccaccactcatcaacaggcattaccagatactatagctgctgcaaccaaggcaataacagcagacccaagtttccaatctgctttagcagctgctctcacatctatcattggcactggaaatagcggcagcagtggcgttggcagtggtggtggtagtttaaatcttggtagtggggataacatggcacaaaatttgaagtggggtgaaaatttttcagtggctagcagttgctcatcaacaattactactcctaaaggcaatgcatgtgcaacaagctacctgaacaaaactacttcaacaaactctcagccaggaaatttgatgttactgccgcctaattcgctgccattttcttctcctaagagtcctaatgacagcagagaccacgccagttaa

SEQ ID NO: 167 - protein, 651 aa, Ricinus communis
MEDHALMRRSGHGGLPKEEIPPPDSSSGGGDDQGSCREDIVAKVGNKRPYHETDDIKSSLSEPNKDLSWNKQVGIATNKERPTMDFYSKASSSSPKQQDNWLESARAEMEEVRKENQRLKLYLGQMMKDYQALQKQFYEIIQQEETKKSTSTVDNHDHNLDHHQTVEEPELVSLSLGRFSSDYSIKDGKSKTSSQGKDDNEIANNEGLFLGLDCKFEVSEVINGNEQSLRPSPVDSFEEQPKEEDGETWPPKVLKNTMPGGEDEALQQNPLKKARVCVRARCDTPTMNDGCQWRKYGQKIAKGNPCPRAYYRCTVAPSCPVRKQVQRCADDMTILITTYEGTHNHQLPLSATAMASTTSAAASMLLSGSSSSSRTGPNHSSPTTSIPADLHGLKFFLSNNSYDSKQFNLHNSSLSTSPSHPTITLDLTNSSNPPSSSTFINRPFSSTYPPVPKFAPPNTLNFGSSESSGMPWSNGFFSYGNNTSQPYNKNPLIGSLNLGRSIMENNIFQSYMQKKTPATTTTHQQALPDTIAAATKAITADPSFQSALAAALTSIIGTGNSGSSGVGSGGGSLNLGSGDNMAQNLKWGENFSVASSCSSTITTPKGNACATSYLNKTTSTNSQPGNLMLLPPNSLPFSSPKSPNDSRDHAS

SEQ ID NO: 168 - DNA, 1509 bp, Vitis vinifera
atgggggaggtgagagaagaaaatgagagactaaagaccatgttggagaaaattgggaaggattataagtctcttcaactgcaggtttttgacattcttcaacaagaatcctccaagaggcctgtggattcagctcctgccattgatgaagaatccaaagaactcgaactagtttccctttgccttggaagaagtagtccaactgatggtaaaagagatggtaagtccagcatcgctagcaaggccaaggaagacgacgatgagctgaatgctggtctcacccttggtttagactcaaaatttcaagtgtctaaactggatgtgacagagtttgcgtccaactcgagtccaaccgagaatagtatcgaggaggtgaaggaagaggaagctggggagacatggcctcccagtaaagttttgaagacaatgagaaccggagatgaggtttcacagcagtcccatgtgaagagagccagggtttcagttagagctcgatgtgacacgctaacgatgaatgatgggtgccaatggaggaaatatggacagaaaatagctaaggggaatccatgcccacgagcttattatcggtgtacagttgcaccatcttgcccagtgagaaagcaggtgcagagatgtgcagaggacatgtccattttgatcactacctatgaaggaactcacaaccacccacttccgatgtcagccacagccatggcttccaccacctctgctgcagcttccatgctcatctccggctcttctgcctctcagccaggccttggttcctcacctgctgctactgagctccatgggttgaacttcagtctccctgataatatgagaacaaggcagctctatgcagcaaactcttccccatttccaactattactctagacctcaccactacagcttcatcatcctctcatttcagcaggttttcctcaagcttcaattctagcaccccaaggttcccgtcaacaagtcttagcttttcttcctcagaatccaacagtgtacctacagtttggggcaatgggtgccttaattatggcatactaccacataataaagctcaaatagggtctctaaatcttggaagacaaccaccagaacattttcatcaaccctacatggaaaagaacggccaagcacctattcaacagtccttaactgaaacattgaccaaggtgataacatcagacccaagttttcggacagttatagctgcggcgctctcatcaatggttagcagcagtaccggccaaccaaacccaggtgcaggagagagcttgggccagaatttgaagtggggtgagactactcaggccatttctaccaacccattgagccagaatgggaagggatgtgcacctgggtacttaaatgcgtcatcatcttcaaattctcagacaggaaactccatcctcctccagcctccatttccagtttccatccctagaagtggtacttctgggtctgctgctgagaacagggaccagaacaactga

SEQ ID NO: 169 - protein, 502 aa, Vitis vinifera
MGEVREENERLKTMLEKIGKDYKSLQLQVFDILQQESSKRPVDSAPAIDEESKELELVSLCLGRSSPTDGKRDGKSSIASKAKEDDDELNAGLTLGLDSKFQVSKLDVTEFASNSSPTENSIEEVKEEEAGETWPPSKVLKTMRTGDEVSQQSHVKRARVSVRARCDTLTMNDGCQWRKYGQKIAKGNPCPRAYYRCTVAPSCPVRKQVQRCAEDMSILITTYEGTHNHPLPMSATAMASTTSAAASMLISGSSASQPGLGSSPAATELHGLNFSLPDNMRTRQLYAANSSPFPTITLDLTTTASSSSHFSRFSSSFNSSTPRFPSTSLSFSSSESNSVPTVWGNGCLNYGILPHNKAQIGSLNLGRQPPEHFHQPYMEKNGQAPIQQSLTETLTKVITSDPSFRTVIAAALSSMVSSSTGQPNPGAGESLGQNLKWGETTQAISTNPLSQNGKGCAPGYLNASSSSNSQTGNSILLQPPFPVSIPRSGTSGSAAENRDQNN

SEQ ID NO: 170 - DNA, 1818 bp, Vitis vinifera
atgaacaaggaagaaagagctatggaggccgctttgagaagatctggtcatggggttgttgtgaaggaagagaggagacctgaagcaccatgcgatgacgatgaaggttgcagagacaaggctgctgccaaggctgataaaacgaagtcatcttcccccagacgcgaggatttaaactgcagttctgtgcagttaccagcaataagtaagatggaaagatcgatatcgtctgctgaaccggactcaggagcgagttcctcgagccacaaggatcaggatgatcagcttgaatcagccaaagctgaaatgggcgaggtgagagaagaaaatcaaaggctaaggatgtatttagatcaaattatgaaggattacaagactcttcaaatgcaattctacgacgttgtccgacaagaagctaaggaatccacagaaaaggcgagcattttacaaattgaggaacccgagtttgtttcccttagcctgggaagagtttcaagtgacccaaaaaaggatgaaaagaacaaaactactagcaaagtggaggatgacggagtcaaaggcggccttagtctcggacttgactgcaaatttgaagtgctgaatccaagccctgagaatagctttggaggaccaaaggaagctgccggagagagttggccacctagtaaaagcctgaagacaatgagaaccggagatgatgaaatttcacaacagaaccccgcgaagaggtgtagggtttctgtgagagctagatgtgataccccaacgatgaatgatggatgtcaatggaggaaatatgggcagaagattgcaaaaggaaacccatgtccacgagcatactatcgctgcacagttgcaccatcttgcccagttagaaaacaggtacaaagatttgctgaagacatgtccatcttgattaccacctatgaagggacacacaaccatccactcccttactcagccactgcaatggcttccaccacttcagcagctgcttccatgctcatgtccggctcctcgagctctcaatctggctctggctcctgcccgttatcagccactagtgctgatctccatggggtgaacttttatctatctgacaactcaaaatcaaagcaattctactcaatcaactcgtcgctctcggctgtgtcttcaaacccaacaattacacttgaccttacaacagcctcatcctcttcctcttcctcatcccatttcaataggttatcttcaaattatcctcccccaagatttccttctacaggtttcaacttcagttcttctgaatccaactctctgcctatctcctggagcaatggattgcttagctatggcagtactactactactcaaccctacaacaggaaccatactggatcccaaaattctggacgacatactcaggaaaatttctttcatccccacgtccaaaagaacaacccagctcctgttcaacagcccctaccagatcctattgcagctgcaacaaaggcaatcgcatcagacccgagtttccaatctgctttagcagctgcccttacatcaataatgggtgctaatggtggaacccatgctaaccatagtggaggagaggcctttggccagaaattgatgtggggtagtgaatcccttcctgctgtttctacctatcagtcaacctctaaaggaaatggatgtgcatccagctacttgaacaaatcgccacccacaaattctcagccgggaagcttgatgtttcttcctcctgcattgccattttccacctctaagaatgcatctgcatcccctgctgaaaatagagagcacactagttga

SEQ ID NO: 171 - protein, 605 aa, Vitis vinifera
MNKEERAMEAALRRSGHGVVVKEERRPEAPCDDDEGCRDKAAAKADKTKSSSPRREDLNCSSVQLPAISKMERSISSAEPDSGASSSSHKDQDDQLESAKAEMGEVREENQRLRMYLDQIMKDYKTLQMQFYDVVRQEAKESTEKASILQIEEPEFVSLSLGRVSSDPKKDEKNKTTSKVEDDGVKGGLSLGLDCKFEVLNPSPENSFGGPKEAAGESWPPSKSLKTMRTGDDEISQQNPAKRCRVSVRARCDTPTMNDGCQWRKYGQKIAKGNPCPRAYYRCTVAPSCPVRKQVQRFAEDMSILITTYEGTHNHPLPYSATAMASTTSAAASMLMSGSSSSQSGSGSCPLSATSADLHGVNFYLSDNSKSKQFYSINSSLSAVSSNPTITLDLTTASSSSSSSSHFNRLSSNYPPPRFPSTGFNFSSSESNSLPISWSNGLLSYGSTTTTQPYNRNHTGSQNSGRHTQENFFHPHVQKNNPAPVQQPLPDPIAAATKAIASDPSFQSALAAALTSIMGANGGTHANHSGGEAFGQKLMWGSESLPAVSTYQSTSKGNGCASSYLNKSPPTNSQPGSLMFLPPALPFSTSKNASASPAENREHTS

SEQ ID NO: 172 - DNA, 1644 bp, Zea mays
atggaggtcgcggtcgtggaaagtcctcgtcctcctccgccgccgccgcaggccaaggaggagaagaggtccgacgccaccaagccagagatcgccgcatcgatggtaggaagcgctctcccaatagtcttcgaaagctttccgtcgacgcaaagagaagcggcggcggcgggcgtcaaacaggaggagcgcaggctggaggcggccagggcggagatgggcgaggtgagggaggagaacgagcgcctcaagtcgatgctgtcccgcatcgtcggccagtaccagtccctgcagacgcacttcctcgacgtcgtcaaggtgcgcgagctggcatcatcgtcagccaaggcggcggcagagaacaagatccccgcggcgccggctctgctgcccggcaccgacgacggcgacgaaccctacgacgacctcgtctccctgagcctcggcacgagggcgaatagcagcggcggcggccctcgccgcaaggggcacgacgacaggtcggcgtcctcgtctggcaccgctgacgagatgcccaataccgccgacgacgaacgccgccaccagatctccctcggtctcggcttcgcgcgcgggcttccgccatcgggcacggcggcggccgcggacgacgacaaggccagccacgacgcgtccacggcgccggtcctgaacctgagctccgacagcagcggcagcgccggggacaccgacaccacgaagcctgccctggccgccgcgggcgccgcccgtaagagcccgagtgccggtgccggagacgggtcagctgacgacgaggtgcagcagcaggccaagaaggctagggtttccgtcagggtcaagtgtgacactcccacgatgcccgatggctgccaatggcggaagtacgggcagaagatctccaaggggaacccgtgcccgcgcgcctactaccgctgcacggtggcgccgcactgcccggtgaggaagcaggtgcagcggtgcgcggaggacacgtcggtcctgatcaccacgtacgattgcgcgcacaaccacccgctcccgccggcggcgacggccatggcgtccacgacctccgcggcggtggccatgctcacctatggatccaccacctccgccgcctcggcctcgctcgtccacggccaccaataccactcgctggcggccgccgccgggcttctcggccccaccaccatggtctccaccgccgcgtcctgccccaccatcacgctcgacctcacctcccccgccgcgccgcactccctcgtgcactcctccttgccctacgccgccgccgccgccgcagcagcagcggggttcgagtccaaggcggtccccgcggcgtggagcagcgggtacctggcgtacggcggcgcccacccgtcctacgacaccaagatctcgtcggcgttggggcacctgttcggtggaagcctgggcgtgccatcgagaccggaacagctgtacgcccagtcgtacctgcagagagctaatagcctgggcgacggccatggtgcggtggcgcccgccgtcacggacacgctcgcgaaggcgatcacgtcggatccgagcttccagtcggtgctggcagcggcgatcacgtccgtcatggggcgcggcggagccgctgctacccagaagtga

SEQ ID NO: 173 - protein, 547 aa, Zea mays
MEVAVVESPRPPPPPPQAKEEKRSDATKPEIAASMVGSALPIVFESFPSTQREAAAAGVKQEERRLEAARAEMGEVREENERLKSMLSRIVGQYQSLQTHFLDVVKVRELASSSAKAAAENKIPAAPALLPGTDDGDEPYDDLVSLSLGTRANSSGGGPRRKGHDDRSASSSGTADEMPNTADDERRHQISLGLGFARGLPPSGTAAAADDDKASHDASTAPVLNLSSDSSGSAGDTDTTKPALAAAGAARKSPSAGAGDGSADDEVQQQAKKARVSVRVKCDTPTMPDGCQWRKYGQKISKGNPCPRAYYRCTVAPHCPVRKQVQRCAEDTSVLITTYDCAHNHPLPPAATAMASTTSAAVAMLTYGSTTSAASASLVHGHQYHSLAAAAGLLGPTTMVSTAASCPTITLDLTSPAAPHSLVHSSLPYAAAAAAAAAGFESKAVPAAWSSGYLAYGGAHPSYDTKISSALGHLFGGSLGVPSRPEQLYAQSYLQRANSLGDGHGAVAPAVTDTLAKAITSDPSFQSVLAAAITSVMGRGGAAATQK

SEQ ID NO: 174 - DNA, 2194 bp, Oryza sativa; identical to SEQ ID NO: 97

SEQ ID NO: 175 - DNA, 1264 bp, Oryza sativa
tcgacgctactcaagtggtgggaggccaccgcatgttccaacgaagcgccaaagaaagccttgcagactctaatgctattagtcgcctaggatatttggaatgaaaggaaccgcagagtttttcagcaccaagagcttccggtggctagtctgatagccaaaattaaggaggatgccaaaacatgggtcttggcgggcgcgaaacaccttgataggtggcttaccttttaacatgttcgggccaaaggccttgagacggtaaagttttctatttgcgcttgcgcatgtacaattttattcctctattcaatgaaattggtggctcactggttcattaaaaaaaaaagaatctagcctgttcgggaagaagaggattttgttcgtgagagagagagagagagagagagagagagagagagagaaggaggaggaggattttcaggcttcgcattgcccaacctctgcttctgttggcccaagaagaatcccaggcgcccatgggctggcagtttaccacggacctacctagcctaccttagctatctaagcgggccgacctagtagccacgtgcctagtgtagattaaagttgccgggccagcaggaagccacgctgcaatggcatcttcccctgtccttcgcgtacgtgaaaacaaacccaggtaagcttagaatcttcttgcccgttggactgggacacccaccaatcccaccatgccccgatattcctccggtctcggttcatgtgatgtcctctcttgtgtgatcacggagcaagcattcttaaacggcaaaagaaaatcaccaacttgctcacgcagtcacgctgcaccgcgcgaagcgacgcccgataggccaagatcgcgagataaaataacaaccaatgatcataaggaaacaagcccgcgatgtgtcgtgtgcagcaatcttggtcatttgcgggatcgagtgcttcacagctaaccaaatattcggccgatgatttaacacattatcagcgtagatgtacgtacgatttgttaattaatctacgagccttgctagggcaggtgttctgccagccaatccagatcgccctcgtatgcacgctcacatgatggcagggcagggttcacatgagctctaacggtcgattaattaatcccggggctcgactataaatacctccctaatcccatgatcaaaaccatctcaagcagcctaatcatctccagctgatcaagagctcttaattagctagctagtgattagctgcgcttgtgatc

SEQ ID NO: 176 - DNA, 58 bp, Artificial sequence
  primer: prm10976
ggggacaagtttgtacaaaaaagcaggcttaaacaatggagtgcagttctgggagatc

SEQ ID NO: 177 - DNA, 57 bp, Artificial sequence
  primer: prm10977
ggggaccactttgtacaagaaagctgggttcaccaattaattggtgttgtcactatt

SEQ ID NO: 178 - DNA, 884 bp, Populus trichocarpa
atggtgaggccttatggtaaagggcacaagaaaaggaagaaaggggagaggtatgataaggaagaagaggaagtggaagaagaacaagttgaagaagagaaagctgatagtgagactgaaatgagagctcaagatggcgaagaaaaaacagaagaggaaaaagaaatgcaactgccaggagtggaggagggcattcctattgtcccaagtcatcaaactggcaagaaacctggggttatattcgtgctcgaaaaggcttctttggaagttgcaaaagttggaaagagttaccaaattttgaattctgaggagcatgccaatttcctgcggaggaataaaaaaaatcctgctgattacagacctgacattatttatcaggctctcctatccatcttagatagcccactgaataaggctgggcggttgagagctgtatatgtgaaaacagataaaggtgttctttttgaagttaagccacatgttcgtattccgaggacttacaagcgttttgccggtattatgttgcagctgctacaaaaactgagtataactgctgtcggtaatcgtgagaagcttttgcgtgtgatcaagaatcctgtaacccaatacctgccattaaactctcgtaaaataggcttctcccatagctcagaaaaattggtccaaatggagaagtatgtggctggagttggtgatgacaccgaccttgttttcgtggttggtgctatgtcccatggtaaaattgaatgtgattatgtagatgacttcatatcagtgtctgaatatccgctgagtgctgcctggtgtattgcaagggtatgcgaggctgtgtcgaagaagtggcgtgtgctttaaactctcatgtctctgcattttgtcgatca

SEQ ID NO: 179 - protein, 284 aa, Populus trichocarpa
MVRPYGKGHKKRKKGERYDKEEEEVEEEQVEEEKADSETEMRAQDGEEKTEEEKEMQLPGVEEGIPIVPSHQTGKKPGVIFVLEKASLEVAKVGKSYQILNSEEHANFLRRNKKNPADYRPDIIYQALLSILDSPLNKAGRLRAVYVKTDKGVLFEVKPHVRIPRTYKRFAGIMLQLLQKLSITAVGNREKLLRVIKNPVTQYLPLNSRKIGFSHSSEKLVQMEKYVAGVGDDTDLVFVVGAMSHGKIECDYVDDFISVSEYPLSAAWCIARVCEAVSKKWRVL

SEQ ID NO: 180 - DNA, 943 bp, Populus trichocarpa
cctaaccactctcatctctttgcctcttctactctcactggccaattttttcttggtgtgaaggataaggttattgtgagtgaagaaaatggtgaggccttatggtaaagggcacaagaaaaggaagaaaggggagaggtatgataaggaagaagaggaagaggaagaagaacaagttgaagaagagaaagctgatagtgagactgaaatgagagctcaagatggcgaagaaaaaacagaagaggaaaaagaaatgcaactgccaggagtggaggagggcattcctattgtcccaagtcatcaaactggcaagaaacctggggttatattcgtgctcgaaaaggcttctttggaagttgcaaaagttggaaagagttaccaaattttgaattctgaggagcatgccaatttcctgcggaggaataaaaaaaatcctgctgattacagacctgacattatttatcaggctctcctatccatcttagatagcccattgaataaggctgggcggttgagagctgtatatgtgaaaacagataaaggtgttctttttgaagttaagccacatgttcgtattccgaggacttacaagcgttttgccggtattatgttgcagctgctacaaaaactgagtataactgctgtcggtaatcgtgagaagcttttgcgtgtgatcaagaatcctgtaacccaatacctgccattaaactctcgtaaaataggcttctcccatagctcagaaaaattggtccaaatggagaagtatgtggctggagttggtgatgacaccgaccttgttttcgtggttggtgctatgtcccatggtaaaattgaatgtgattatgtagatgacttcatatcagtgtctgaatatccgctgagtgctgcctggtgtattgcaagggtatgcgaggctgtgtcgaagaagtggcgtgtgctgtaa

SEQ ID NO: 181 - protein, 284 aa, Populus trichocarpa
MVRPYGKGHKKRKKGERYDKEEEEEEEEQVEEEKADSETEMRAQDGEEKTEEEKEMQLPGVEEGIPIVPSHQTGKKPGVIFVLEKASLEVAKVGKSYQILNSEEHANFLRRNKKNPADYRPDIIYQALLSILDSPLNKAGRLRAVYVKTDKGVLFEVKPHVRIPRTYKRFAGIMLQLLQKLSITAVGNREKLLRVIKNPVTQYLPLNSRKIGFSHSSEKLVQMEKYVAGVGDDTDLVFVVGAMSHGKIECDYVDDFISVSEYPLSAAWCIARVCEAVSKKWRVL

SEQ ID NO: 182 - DNA, 806 bp, Populus trichocarpa
tgccacttcaacttttatctcagtggccacctttcaattggcaagtactcaaactgccaaaaaacctggggtcatatttgtgctggaaaaggcatctttggaagttgcaaaagttggaaagaattaccaaattttgaattctgaggagcatgccaatttcctgaggaggaataataaaaatcctgctgattacaggcctgacatcatttatcaggctctcctatccatcttagatagcccattgaataaggctgggtgtttgcgagctgtatatgtgaaaacagataaaggtgttctttttgaagttaagccatatgttcgtattccaaggacttataagcgttttgctggtattatgttgcagctgcttcaaaagcttagtattgctgctgttggtaagcgtgagaagcttttgcgcgtgatcaagaatcctgtaacccagcacctacctttaaactctcgtaaaataggcttctcccatagctcagacaaatttgtcgaaatggagaagtatgtagccggagttggtggtgacactgaccttgttttcgtggttggtgctatgtcccatggtaaaattgaatgtgattatatagatgattttatatcagtttcagaatatccgctgagtgctgcctggtgtattgcaaggatatgtgaggctgtgtcaaagaagtggcgtgtactgtaaactttcatgtttctggatttcgtcaacgatatcattgtttggtagtttataaccagtcttgaagactgaagtacatgtaaaccaaaccgcagtccaaaaacaatttgattggcaa

SEQ ID NO: 183 - protein, 111 aa, Populus trichocarpa
MLQLLQKLSIAAVGKREKLLRVIKNPVTQHLPLNSRKIGFSHSSDKFVEMEKYVAGVGGDTDLVFVVGAMSHGKIECDYIDDFISVSEYPLSAAWCIARICEAVSKKWRVL

SEQ ID NO: 184 - DNA, 1331 bp, Gossypium raimondii
ccgtcgcttaaacagaacccatcgccgtccttgaacgcctcccccgtccgtcgatccgtttacgccctcttcgccgccgcccactgataaaatatttcaagccgataaaatggtacgacctgtatgctattaaagggaagaaacggaagaatagaggcgagaagtatgataaagaagaacaagaacatgaagaacaagtagaagaagaagagagagaaccagcaaaacaagctgctattgaaaagccaacagaggaagtcgaaggtaaagaagaagaggaaggaggtgaagctggaacagatgaacttgagggaatcccaattgccccctctgataaaaagaataacaaaaatggtgtaatttttgttcttgagaaggcttcattggaagttgctaaagttggaaagagttttcaactcttgaactcagatgatcatgccaatttcttgcggaaaaataacaagaatcctgctgattacagacctgacataacacatcaggctctactgtcgattctagatagtccggtcaataaggctgggagattgcaagctgtgtatgttagaactgagaaaggtgtactttttgaagttaaacctcatgttagaattccgagaacatataagcggttctctggtattatgttgcaactgctacaaaaactaaatataactgccgttggcaagcgtgaaaagcttttacgagtgataaagaatcccgtaaccaattactttcctgtcaactctcgcaaaataggtttctcatatagctcagacaaattagctaaaatgaggaaatacgtagatgctgttggtgatgatgtgaatcttgtttttgtggtgggtgcaatggcccatgggaaaatagaggtagattatatagatgattttatagcgatttccggttatccgctaagtgctgcaatgtgcattgcaaggattactgaagctttggcagataagtggagcatattgtaacacccatataatatgtctctctctgttgcaatggcttcgattttgggatagattatcaatgatgaattactttaatttataatgtggtacgtttattttatgttaaaaaaacggaatatgcagttttcttgtttaggtaatatatggaagtgagcagctagaaaaatattttcaagagaaaagatgttatttgatagggatagcaatagaccaagacgggattacggtacgtgttagtatcgatgttgaaaatattttagcatgtaagctaatccaaaccaaattcgtttcaaattgttatgttactcaaccttgtgcttttttaatttgattatatatttatattttattgat

SEQ ID NO: 185 - protein, 111 aa, Gossypium raimondii
MLQLLQKLNITAVGKREKLLRVIKNPVTNYFPVNSRKIGFSYSSDKLAKMRKYVDAVGDDVNLVFVVGAMAHGKIEVDYIDDFIAISGYPLSAAMCIARITEALADKWSIL

SEQ ID NO: 186 - DNA, 1012 bp, Poncirus trifoliata
gaaaaatatgatagagaagaagaggaggaagaaaaggaagaagtagaagaagaggaattgaacgattcaggaaagagggctaaattagagaaaacttcacaaaatgataataagaagggagaggaagatggacaagaagaaaaagatgtggtcgttcatgaaatggaaggtattccaattgccccaagtgatcaaaataccaagagaccaggtgttatttttgttctcgagaaagcttctcttgaagttgctaaagttggaaagagttaccagattttaaattctgatgatcactccaatttcttgcgaaggaataacaaaaatccagctgattacaggcctgacatcgttcatcaggctctcctatcaattttagacagcccactaaccaaggctgggaggttacaagctgtctatgttagaaccgataaaggtgttctttttgaagttaaaccacatgttcgtctaccaaggacatataagcgttttgctggtatcatgttgcagctgctgcaaaaactaagcataacagctgttggcaagcgtgagaaattattgcgtgtgatcaagaatcctgtcacccaatatttatctgtaaactccagaaagataggtttctcatatagttcagaaaaattggttaagatgaggaattatgtggcttccatcagtgatgacgacaaccttgtttttgtggttggtgcaatggcacatgggaaaaatcgattgtgattatacagatgatttaatatcaatttctggctatccactgagtgctgcccgttgcatcgcaaggatttgcgaagctttggaggataagtggaatctgttgtaaacgtctctttttagttctctctttgttttttcttcttttcccagcttgtagtaattgtttatttcacttttaaagtgatacttgtgtaactggaaatgctgagcttgtggattgtttgtgttttgagggatgaactttttaggttatatactacctaaaagaatttttgagagtatg

SEQ ID NO: 187 - protein, 189 aa, Poncirus trifoliata
MEGIPIAPSDQNTKRPGVIFVLEKASLEVAKVGKSYQILNSDDHSNFLRRNNKNPADYRPDIVHQALLSILDSPLTKAGRLQAVYVRTDKGVLFEVKPHVRLPRTYKRFAGIMLQLLQKLSITAVGKREKLLRVIKNPVTQYLSVNSRKIGFSYSSEKLVKMRNYVASISDDDNLVFVVGAMAHGKNRL

SEQ ID NO: 188 - DNA, 1116 bp, Vitis vinifera
atggtacggccttatgccataaaagggcacaagcgaaagaagagggaagagaactatgatagagaggaagtagaacaattgctagaagaggagacagcagcaacagccacacaggatgagaagaaggcagaagaagtcacacttgaacttcctggtatcccacttgtcccatccaacttgaacaacaagactggtgttaccttcattcttgagagggcttgtttggaagttgcaaaagttggaaagagttaccagctattgagctcagaggatcatgcaaatttcctgaggaaaaataacaaaaaccctgctgaatacagacctgacattcttcatcaggctctcttaactattttagatagcccactaaataaggctgggaggctacgagctgtgtatgtaagaaccgagaaaggtgtgctttttgaagttaagccacatgttcgcattccaaggacatataagcggttctctgggatcatgttgcagctgttacaaaaactgagcattactgctgttggtaagcgggagaaacttttacgcgttatcaagaacccagttactcaatacttacctgttaactctcgaaaaataggcttctcatatagttcagaaaagtcaattccaatgcgggactatgtggctgctgttagcgatgatgtggaccttgtttttgtggttggtgcaatggcccatgggaaaattagtaacgattatacagatgatttcatagcaatttctggctatccattgagtgctgcatggtgtacttatttgatctgcggggccttgatgcagaagtggaatatattttaggtccctgtctaaaagctgaagattgggagctgatgttttcatttccagtagtacatgtaaatccaggtgcaatgcttgcatttaggatatttagcactttttgttgagggaatatatgaatgttgtcatgtttttgaaaaaggaagaaagaaaatttaagctggacttcctatgtatattgagcttctgatcgactattacagaaatccttttgttcacaacataaactgtgatgcaaagaggataaggtggattgtctagagggctatcactgtaccctttgctacatagattttgcct

SEQ ID NO: 189 - protein, 271 aa, Vitis vinifera
MVRPYAIKGHKRKKREENYDREEVEQLLEEETAATATQDEKKAEEVTLELPGIPLVPSNLNNKTGVTFILERACLEVAKVGKSYQLLSSEDHANFLRKNNKNPAEYRPDILHQALLTILDSPLNKAGRLRAVYVRTEKGVLFEVKPHVRIPRTYKRFSGIMLQLLQKLSITAVGKREKLLRVIKNPVTQYLPVNSRKIGFSYSSEKSIPMRDYVAAVSDDVDLVFVVGAMAHGKISNDYTDDFIAISGYPLSAAWCTYLICGALMQKWNIF

SEQ ID NO: 190 - DNA, 1135 bp, Arabidopsis lyrata
ctttaacttcgaattagggtttatcaggattcagtcgcctgctcacttgaatttcttcgcaagctcaagaagtttagcgaaatttttgaaggaagatggtgaggccgtatgggattaaagtgaacaagagaaaggagagaacagagaggtatgataaggaagaagaagaagtagaggaacaaccaaagtttgagcgaaaacaaaaggcaagagaaagttcgaagaaagctaaaaaagaaatcacttcaagagcagaggaaggtaatgaagaggaggaaataactgaggaagtaacagcagcagcagcagaggatattgtgggagggatacctattgtccttagtgctcctaacaaggaaaagcccggtgttgttttcgtgcttgagaaggcctctcttgaagttgccaaagttggaaagacttaccagctactgaactcggatgatcatgctaatttcttgagaaagaacaacagaaatccggctgattaccgaccagacatcactcttcaggctcttcttatgattttggatagtccggttaataaggctgggaggttgaaagcggtatatgttagaacagaaaaaggtgtcctttttgaagttaagccacatgttcgtataccaagaactttcaaacgatttgctggaatcatgttgcaattgctacaaaagctgagcatttctgcagttggcagcggtgagaagcttctacggtgtgtcaagaaccctatcgaagaatatcatctaccggttaactcccacagaacaggcttctcgcatagctctgaaaaactcgtcaatatgcagaaacacctagctactatatctgatgatacagacacagtttttgtggtcggcgcaatggcacacgggaaaatagagtgcgactatatcgatgagtttttgtcgatttcagggtatccattgagcgcagcctactgtatctcaagaatctgcgaggcattagcaacaaattggaatatcatataaagaattattataaggtcctctgttttcctctctactgctctaatgatggaactactttaagctacaatgttgtgatacacattgttcatctactatcgagttttaataacttataacttttcgtttgaaattttgactccact

SEQ ID NO: 191 - protein, 298 aa, Arabidopsis lyrata
MVRPYGIKVNKRKERTERYDKEEEEVEEQPKFERKQKARESSKKAKKEITSRAEEGNEEEEITEEVTAAAAEDIVGGIPIVLSAPNKEKPGVVFVLEKASLEVAKVGKTYQLLNSDDHANFLRKNNRNPADYRPDITLQALLMILDSPVNKAGRLKAVYVRTEKGVLFEVKPHVRIPRTFKRFAGIMLQLLQKLSISAVGSGEKLLRCVKNPIEEYHLPVNSHRTGFSHSSEKLVNMQKHLATISDDTDTVFVVGAMAHGKIECDYIDEFLSISGYPLSAAYCISRICEALATNWNII

SEQ ID NO: 192 - DNA, 1122 bp, Phaseolus vulgaris
ggagaattggaatttgtttgaggccgaggcaatgacacgacctttcggtgtgaaggggaagaagcgaaagcactcccaatccaaacagtactcagaagaagaacaccaacagccgccaccaaagaaagctgttgccgaagaaagcaaagaaccgtcaccggaaccgtcaccagaaccagaaccagaaagagaatcagaaccagcaccaacagaagaggatgaattgagtggtatcccaattgtgcccagtgagaaaaacagtaccaaacccaacgtcatcttcatcctcgaaaaagcttctctcgaagtcgccaaagtcggcaagacatatcaacttttgaactccgatgaccatgccaatttcctccgcaaaaacaacaagaatcctggagattataggcctgatattacacatcagtctctgctatctattctggatagcccactgaataaagctggaagattgcgaagtgtttatataaggacggagaaaggtgttcttatagaggttaagccctttgttcgaattcccagaacattcaaacgttttgctggtgttatgttggaactgcttcaaaaactgagcatatctgctgttggcaagcgcgagaaactcctccgaaccataaaaaatcctgtcacacagtatttgcctgttaactcacggaaaataggtctatcatatagttcagaaaaccttgtagatatggatgactatgtatcaactatttccagcaatacggaccttgtttttgtggtaggagcaatggcccatgggaagattgagacagattatacagaagattatctagcaatttcggggtacccgctaagtgctgcttattgtattacaaggattactggtgcccttgagagaaagtggaagattttgtgatttaacaccttcaagcctgggaaacgatttactaatttcagtacctcagtcaatttatgtaataccaaggtagggtcttgtcttaacagacatataggaaatacaatataagttattttttcctgaggtatttttagggtctgattttcctgttccagatcggtgtttcactactgtatttgaattaaatgtttaatatattgttttgctggaggatgctttcttaa

SEQ ID NO: 193 - protein, 287 aa, Phaseolus vulgaris
MTRPFGVKGKKRKHSQSKQYSEEEHQQPPPKKAVAEESKEPSPEPSPEPEPERESEPAPTEEDELSGIPIVPSEKNSTKPNVIFILEKASLEVAKVGKTYQLLNSDDHANFLRKNNKNPGDYRPDITHQSLLSILDSPLNKAGRLRSVYIRTEKGVLIEVKPFVRIPRTFKRFAGVMLELLQKLSISAVGKREKLLRTIKNPVTQYLPVNSRKIGLSYSSENLVDMDDYVSTISSNTDLVFVVGAMAHGKIETDYTEDYLAISGYPLSAAYCITRITGALERKWKIL

SEQ ID NO: 194 - DNA, 1160 bp, Brassica napus
ggagggtttatctagcgaaccgcaccgattcgattcagtcgcctgctcacccgaatcgtctccgcaagctaaagagtatcggatttttgattttgaaggaaagatggtgaggccgtatgggattaaggtgaacaagaggaaggagagaaaagagaggtacgataaggaagaagacgaagaagaggaacagcctaagttcgagcagaaacaaaaagaaaaagaaagggtgaagagggcgaaaagagaagtcacatcaaaagcagaggaggaagatgatgaagagaatgagatagctgaggaagcagcagcagatgagcttgatgtgggaatacctatcatcgtgtctgatgataagaaggaccagactggcgttatttttgtgcttgagaaggcctctcttgaagttgccaaagttggaaagacttaccagctactaaactctgatgatcatgctaatttcttgaggaagaatggcagagatcctgctcattaccgaccagacatcactcatcaggctcttttgatgattttggatagtccggtcaataaagctgggaggttgaaagcggtgtatgttagaacagagcaaggtgttctttttgaagttaagccacatgttcgtataccaagaacttacaagcggttcgctggaatcatgttgcaattgctacaaaagcttagcattagcgcagctgggaagcgtgagaaacttatgcgagtgatcaagaaccctgttacaggccacctaccgcctaactgtagaaaaataggcttctcgtatagctctgaaaagctggtcaatatgcagaagcacctatcaaccgtctgtaatgagaccgacactgtttttgtgcttggtgcgatgtcacacgggaaaatagagtgtgactatatcgatgattttgtggcgatttcagggtatcctcttagcgcagcttactgtatctcaagaatctgcgaggccttatcaacaaattggaatattatataaaagagtattagtcagaaggtcccttcgtttttctccctactgttctaattgttaaaccattttaagtttgtgtttatgcacactgttcaatctattatcgagttttatgttttgaaactttttgtcagaatttactaaacaaaatatatcgaagtaagatttttttttt

SEQ ID NO: 195 - protein, 295 aa, Brassica napus
MVRPYGIKVNKRKERKERYDKEEDEEEEQPKFEQKQKEKERVKRAKREVTSKAEEEDDEENEIAEEAAADELDVGIPIIVSDDKKDQTGVIFVLEKASLEVAKVGKTYQLLNSDDHANFLRKNGRDPAHYRPDITHQALLMILDSPVNKAGRLKAVYVRTEQGVLFEVKPHVRIPRTYKRFAGIMLQLLQKLSISAAGKREKLMRVIKNPVTGHLPPNCRKIGFSYSSEKLVNMQKHLSTVCNETDTVFVLGAMSHGKIECDYIDDFVAISGYPLSAAYCISRICEALSTNWNII

SEQ ID NO: 196 - DNA, 1201 bp, Arabidopsis thaliana
acaaaaaataaaaaaacgcctacctttaacttcgaattagggtttatcaggattcagtcgcctgctcacttgaatttcttcgcaagctcaaaaagttccgaaatttttgaaggaagatggtgaggccgtatgggattaaagtgaacaagagaaaggagagagaagagaggtatgataaggaagaagatgaagtagaggagcaaccaaagtttgagcaaaaacaaaaggcaagagaaagttcgaagaaagctaaaaaagaaagcacttcaagagcagaggaagataatgacgaggaggaagtaactgtggaagcaactgcagcagcagaggatattgtgggagggatacctattgtccttaatgctcctaacaaggaaaagtctggcattgtattcgtgcttgagaaggcctctcttgaagttgccaaagttggaaagacttaccagctactgaactcggatgatcatgctaatttcttgaaaaagaataacagaaatccggctgattaccgaccagacattactcatcaggcgcttcttatgattttggatagtccggttaataaagctgggaggttgaaagctgtttatgttagaacagaaaaaggtgtcctttttgaagttaagccacatgttcgtataccaagaactttcaaacgatttgccggaatcatgttgcaactgctacaaaagctgagcattactgcagttaacagccgtgagaagcttctacggtgtgtcaagaaccctatcgaagaacatcatctaccggttaactcccacagaataggcttctcgcatagctctgagaaactcgtcaatatgcagaaacacctagctactgtatgtgatgatgatagagacacagtttttgtggtaggcgcaatggcacacgggaaaatagactgcaactatatcgatgaatttgtgtcggtttcagagtatccattgagcgcagcctactgtatctcaagaatctgcgaggcattagcaacaaattggaatattatataaaagaatgattataaggtcctttgttttcctctctactgctctaatggtaggaactactttaagctatgttgttgtgatacacattgtttatctactatcgagtttataacttttcgtttgaaattttgactccactattttattcaaacgtaatataaagtaaaagaaagagatgttcctgtgattaa

SEQ ID NO: 197 - protein, 298 aa, Arabidopsis thaliana
MVRPYGIKVNKRKEREERYDKEEDEVEEQPKFEQKQKARESSKKAKKESTSRAEEDNDEEEVTVEATAAAEDIVGGIPIVLNAPNKEKSGIVFVLEKASLEVAKVGKTYQLLNSDDHANFLKKNNRNPADYRPDITHQALLMILDSPVNKAGRLKAVYVRTEKGVLFEVKPHVRIPRTFKRFAGIMLQLLQKLSITAVNSREKLLRCVKNPIEEHHLPVNSHRIGFSHSSEKLVNMQKHLATVCDDDRDTVFVVGAMAHGKIDCNYIDEFVSVSEYPLSAAYCISRICEALATNWNII

SEQ ID NO: 198 - DNA, 1050 bp, Brassica napus
tcattccgaatcttctctgcaagctaaagggtatcggatttttgattttgaaggaaagatggtaaggccgtatgggattaaggtgaacaagaggaaggagagaagagagaggtacgataaggaagaagacgaagaagaggagcagcctaagttcgagaagaaacaaaaagaaagggtgaagagggcgaaaaaagaagtcaccgcaaaagcagaggaggaagatgatgaagagaatgagatagctgaggaagcagcagatgagcttgatgtgggaatacctattgtcgttactgataataagaaggaccagactggcgttatttttgtgcttgagaaggcctctctcgaagttgccaaagttggaaagacttaccagcttctaaactctgatgatcatgctaatttcttgagaaaaaatggcagagatcctgctcattaccgaccagacatcactcatcaggctcttttgatgattttggatagtccggtcaataaagctgggaggttgaaagcggtgtatgttagaacagagcaaggtgttctttttgaagttaagccacatgttcgtataccaagaacttacaagcggttcgctggaatcatgttgcaattgctacaaaagcttagcattagcgcagctgggaagcgtgagaaacttatgcgagtgatcaagaaccctgttacaggccacctaccgcctaactgtagaaaaataggcttctcgtatagctctgaaaagctggtcaatatgcagaagcacctatcaaccgtctgtaatgagaccgacactgtttttgtgcttggtgcgatgtcacacgggaaaatagagtgtgactatatcgatgattttgtggcgatttcagggtatcctcttagcgcagcttactgtatctcaagaatctgcgaggccttatcaacaaattggaatattatataaaagagtattagtcagaaggtcccttcgtttttctccctacgtgttctaattgttaaaccattttaagtttgtgtttatgcacactgttcaatctattatcgagcctcgtgccg

SEQ ID NO: 199 - protein, 292 aa, Brassica napus
MVRPYGIKVNKRKERRERYDKEEDEEEEQPKFEKKQKERVKRAKKEVTAKAEEEDDEENEIAEEAADELDVGIPIVVTDNKKDQTGVIFVLEKASLEVAKVGKTYQLLNSDDHANFLRKNGRDPAHYRPDITHQALLMILDSPVNKAGRLKAVYVRTEQGVLFEVKPHVRIPRTYKRFAGIMLQLLQKLSISAAGKREKLMRVIKNPVTGHLPPNCRKIGFSYSSEKLVNMQKHLSTVCNETDTVFVLGAMSHGKIECDYIDDFVAISGYPLSAAYCISRICEALSTNWNII

SEQ ID NO: 200 - DNA, 1187 bp, Glycine max
agggcagaaacaaaagcataaccctagctaggacgtgtttggagttggtttgagcgtattgaggcaatgacgcgaccttacggtgtgaaggggggccggaagcgaaagcacgccgaacccaaatacgacgaagaagaccaagaaacgcaaccaaaaaaagctgtggtggaggtggagcacaacaaagaagaagaacaacagcaacaaacaccagagggggatgaattgagcggtatcccaattacgcccagtgagaacaacaccaacaaacccaacgtcatcttcattctagaaaaagcttctttggaagtcgccaaagtcggcaagacatatcagctcttaaactccgacgaccatgccaatttcctccgcaaaaataacaagaatcccggagattacaggcctgacattactcatcagtcccttttatctattttggatagcccactaaataaagctgggagattgcggtcggtatacataaggactgaaaaaggtgttcttatagaggttaagccctttgttcgtattccaagaacattcaaacgctttgctggtgtcatgttggaattgcttcaaaaattgagcatatctgctgttggcaagcgcgagaaacttctccgaaccatcaaaaaccctgtcacgcagtatttgcctatcaactcacgaaaaataggtctatcgtatagttcagaaaagcttgtagatatggatgactatgtatcaactgttcccagcaatatggaccttgtctttgtggtaggagcaatggcccatgggaagattgagacagattatacagaagattatgtagcaatttcggggtaccctctaagtgctgcttattgtattacaaggattactggtgcccttgagagaaagtggaagattttgtgatttaacaccaccttcagttcatgcatgagagacgatttagtaataccagttccgtagtcaatttatgtaatacaagggatagggccttgcctagcagtgatataggaaataatttttttctgaggcattgatgtcctggaccagagcgatgtttcaatgtagtacttaaattaaatatgactagtatattattttgttaaaggatgcttatagaagccaaatctaaatgttgcttatactgcgctgagatacgctgcttgggagttactatttttttccttgttcaaacc

SEQ ID NO: 201 - protein, 276 aa, Glycine max
MTRPYGVKGGRKRKHAEPKYDEEDQETQPKKAVVEVEHNKEEEQQQQTPEGDELSGIPITPSENNTNKPNVIFILEKASLEVAKVGKTYQLLNSDDHANFLRKNNKNPGDYRPDITHQSLLSILDSPLNKAGRLRSVYIRTEKGVLIEVKPFVRIPRTFKRFAGVMLELLQKLSISAVGKREKLLRTIKNPVTQYLPINSRKIGLSYSSEKLVDMDDYVSTVPSNMDLVFVVGAMAHGKIETDYTEDYVAISGYPLSAAYCITRITGALERKWKIL

SEQ ID NO: 202 - DNA, 1251 bp, Lotus japonicus
gggtcttccatccgccgccgtaaccgcagtctccgtcgttttcttctcttcctcttcgtcggagttgtggttgagggaagccatgacacgaccttttggtatgaaggggcggaagagaaaggacaaggaagctaaatatgatcgcgaagaagatgaagacgaacaagtgcaacctaagagacctatgctccaaaatgctgaagtagctgcagcaaatgaggaggatgaacttgtaggtatcccaattatgcctagtgaccacaagagtgacaaccctaatgtcatattcattcttgaaagggcttctttggaagtcgccaaggttggcaagacttatcagcttttgaactcggatgaccatgccaatttcctccgcaaaaataacaagaatcctggtgattataggcctgacattactcatcaggcccttctatctattttagatagcccactaaataaagctgggaggttgcaggcagtatacataaagactgaaaaaggtgttcttatagaggttaagccctatgttcgtattccaagaacattcaaacggttctctggtgtcatgttacaactgcttcaaaaattgagcatatctgctgctggcaagcatgagaaacttctccgcacaataaaaaaccctgtgactcagtatctgcctgtcaactcacgaaaaataggtctttcattcagttcagaaaagctcgtaaatatgaatgactacgtatcaactgttccaagcgatatgaaccttgtctttgtggtaggagcaatggcccatgggaaggttgagacggattacacagaggactatatagcagtttctgggtaccctctaagtgctgcttactgtattacaaggatttgcaacgcccttgaggcaaagtggaagatattgtgatttagattcttcagttcatgcctgagatacatttttctagtttcagcagtatattcatgtaataacagggataggcaggcggcctagcagtgatgtgggaaatcaatttcaagattagttaactgtgaggttttttgagggcatgcttgatatattggaccagaatggtgcttttaaagtttattgattgtcaatgctgtatttgaattaatcataccttccaccttgatacattacaaggggatatgctgaacagggtttaatctgtattatgttcactgaactaatacacggttctagatatttgatgggattgatgttgaaataatttattttaaaatcatttagtg

SEQ ID NO: 203 - protein, 272 aa, Lotus japonicus
MTRPFGMKGRKRKDKEAKYDREEDEDEQVQPKRPMLQNAEVAAANEEDELVGIPIMPSDHKSDNPNVIFILERASLEVAKVGKTYQLLNSDDHANFLRKNNKNPGDYRPDITHQALLSILDSPLNKAGRLQAVYIKTEKGVLIEVKPYVRIPRTFKRFSGVMLQLLQKLSISAAGKHEKLLRTIKNPVTQYLPVNSRKIGLSFSSEKLVNMNDYVSTVPSDMNLVFVVGAMAHGKVETDYTEDYIAVSGYPLSAAYCITRICNALEAKWKIL

SEQ ID NO: 204 - DNA, 1144 bp, Glycine max
gcagaagagaaccctagctagggaggacaggtagttggtgtgaggcaatgacgcggcctttcggtgtgaagggggggaggaagcgaaagcacgcggaacccaaatacgacgcccatgacgaagaagaagaagaagaaacgcaaccaaagaaaactgtggtggaggtggagcacaaccaagaagaagaagaagaaactccagcaccagcaccagaggatgatggattgagcggtatcccaattgcgcccagtgcgaacaacactaacaaacccaacgtcatcttcattcttgaaaaagcttctttggaagtcgccaaagtcggcaagacatatcagctcttaaactccgacgaccatgccaatttcctccgcaaaaataacaagaatcccggagattacaggcctgacattactcatcagtcccttctatcaattttggatagcccactaaataaagctgggagattgcgatcagtatacataaggactgaaaaaggtgttcttatagaggttaagccctttgttcgtattccaagaacattcaaacgctttgctggtgtcatgttggaactgcttcaaaaattgagcatatctgctgttggcaagcgcgagaaacttctccgaaccatcaaaaaccctgtcacacagtatttgcctatcaactcacgaaaaataggtctatcatatagttcagaaaagcttgtagatatggatgactacgtatcaactgttaccagcaatatggaccttgtctttgtggttggagcaatggcccatgggaagattgagacagattatacagaagattatgtagcaatttcggggtaccctctaagtgctgcttattgtattacaaggattactggcgcccttgagagaaagtggaagattttgtgatttaacaccaccttcagttcatgcctgagacgatttagtaattcgagttccatagtcaatttatgtaatatcagggataggggcctagcagtgatttagaaaatacaatatatgttgatttttttgaggcattgatgtcctggaccagagtgatgtttcaatgtagtacttgaattaaatatgcttaatatattattttgttgaaggatgcttatagaagctaaatctaaatgttgcttactgcgctg

SEQ ID NO: 205 - protein, 282 aa, Glycine max
MTRPFGVKGGRKRKHAEPKYDAHDEEEEEETQPKKTVVEVEHNQEEEEETPAPAPEDDGLSGIPIAPSANNTNKPNVIFILEKASLEVAKVGKTYQLLNSDDHANFLRKNNKNPGDYRPDITHQSLLSILDSPLNKAGRLRSVYIRTEKGVLIEVKPFVRIPRTFKRFAGVMLELLQKLSISAVGKREKLLRTIKNPVTQYLPINSRKIGLSYSSEKLVDMDDYVSTVTSNMDLVFVVGAMAHGKIETDYTEDYVAISGYPLSAAYCITRITGALERKWKIL

SEQ ID NO: 206 - DNA, 1072 bp, Glycine max
agaaacaaagcataaccctagctaggacgtgtttggagttggtttgagcgtattgaggcaatgacgcgaccttacggtgtgaaggggggccggaagcgaaagcacgccgaacccaaatacgacgaagaagaccaagaaacgcaaccaaaaaaagctgtggtggaggtggagcacaacaaagaagaagaacaacagcaacaaacaccagagggggatgaattgagcggtatcccaattacgcccagtgagaacaacaccaacaaacccaacgtcatcttcattctagaaaaagcttctttggaagtcgccaaagtcggcaagacatatcagctcttaaactccgacgaccatgccaatttcctccgcaaaaataacaagaatcccggagattacaggcctgacattactcatcagtcccttttatctattttggatagcccactaaataaagctgggagattgcggtcggtatacataaggactgaaaaaggtgttcttatagaggttaagccctttgttcgtattccaagaacattcaaacgctttgctggtgtcatgttggaattgcttcaaaaattgagcatatctgctgttggcaagcgcgagaaacttctccgaaccatcaaaaaccctgtcacgcagtatttgcctatcaactcacgaaaaataggtctatcgtatagttcagaaaagcttgtagatatggatgactatgtatcaactgttcccagcaatatggaccttgtctttgtggtaggagcaatggcccatgggaagatcgagacagattatacagaagattatgtagcaatttcggggtaccctctaagtgctgcttatcgtattacaaggattactggtgcccttgagagaaagtggaagattttgtgatttaacaccaccttcagttcatgcatgagagacgatttagtaataccagttccgtagtcaatttatgtaatacaagggatagggccttgcctagcagtgatataggaaataattttttttctgaggcattgatgtcctggaccagagcgatgtttcaatgtagtacttaaattaaatatga

SEQ ID NO: 207 - protein, 276 aa, Glycine max
MTRPYGVKGGRKRKHAEPKYDEEDQETQPKKAVVEVEHNKEEEQQQQTPEGDELSGIPITPSENNTNKPNVIFILEKASLEVAKVGKTYQLLNSDDHANFLRKNNKNPGDYRPDITHQSLLSILDSPLNKAGRLRSVYIRTEKGVLIEVKPFVRIPRTFKRFAGVMLELLQKLSISAVGKREKLLRTIKNPVTQYLPINSRKIGLSYSSEKLVDMDDYVSTVPSNMDLVFVVGAMAHGKIETDYTEDYVAISGYPLSAAYRITRITGALERKWKIL

SEQ ID NO: 208 - DNA, 1107 bp, Aquilegia sp.
ccgtcgttcacttctacaagttgcagttgctctgttcagctcatcagagagagagagatggtgaggccgtttgctgtgaaagggagaaagagaaaaaagagagatgattcatatatagttgaaaagaaaattaaagatgaagaagaagaagtagtagtagaagaagaagaagaagaagaagaagagcaaacaacaccaaagaaacacaaaggagaagaagaagacgagagaatagcagaagaagctgttaacgaattacctggaattccaattgtgccttgttcttcttcttcttctgacaagaaatcaaaatctggtattatttttgtacttgaaaaagcttcattggaagttgctaaagttggaaagacatatcaactattgaactcggatgatcactccagttttctacgaaagcataatcgaaatcctggggattacaggcctgacattgctcatcaggcacttcttgcaattttggatagccctcttaataaggctggaaggctacgtgctgtgtatgtgagaaccgagaaaggggtgctttttgaagtcaagccccatgttcgtataccaagaacatttaagcggttttgtggtgtcatgttacaactactacaaaaactgagtattagtgccactaccaagcgtgaaaagctcctgcgtgtgataaaaaatccagtaacacaacatctacctgtcaactctcggaaagtaggtctatcacatagctccgagaaattagtccagttacaggattacgttgctgctgctaaggatgatatgaatcttgtttttgtggttggtgcaatggcccatgggaaaattgacaaagattatacagatgattttatatcagtatcaggctatccattgagtgctgcatgctgtatttcgcggatatgcaatacattggagctgaaatggaaaatcgtataacctgctggttattctcttaataggtatctgaacgtggaacctcatgtattaagttgatataaagttgacatggtcgtgtgatacgttgatatcttatcatgaagggtctgttaaactgctttggtaaattagttgcaagcatttaaatgtaatcactttctgagaatt

SEQ ID NO: 209 - protein, 293 aa, Aquilegia sp.
MVRPFAVKGRKRKKRDDSYIVEKKIKDEEEEVVVEEEEEEEEEQTTPKKHKGEEEDERIAEEAVNELPGIPIVPCSSSSSDKKSKSGIIFVLEKASLEVAKVGKTYQLLNSDDHSSFLRKHNRNPGDYRPDIAHQALLAILDSPLNKAGRLRAVYVRTEKGVLFEVKPHVRIPRTFKRFCGVMLQLLQKLSISATTKREKLLRVIKNPVTQHLPVNSRKVGLSHSSEKLVQLQDYVAAAKDDMNLVFVVGAMAHGKIDKDYTDDFISVSGYPLSAACCISRICNTLELKWKIV

SEQ ID NO: 210 - DNA, 849 bp, Medicago truncatula
atgacgagagcttacacattaaaggggaaaaagagaaagaacaaggacgcagccacaaaacacgaccatgaacaagaagaagaagaagaacaacaacaacaacaaatcgaaccaacaccgaagaaaccaaatcttcataacgatgaaccaagtgcgccaacagaggaatctgaacttcctggtattccaattgctcctttgaatgaaaagaacagtgagaaacaaggtgttatattcattctcgaaaaagcttctttagaagtcgctaaagttggcaagacgtatcagctgttgaactctgatgaacattctaatttcctacgcaaacatagcaagaatcctggtgattacaggcctgacatttgtcatcaggcacttctatctattttagatagcccagtaaataaagctgggaggttgaaaatggtatacataaggactgaaaaaggcgttcttatagaggttaagccctatgttcgtattccaagaacattcaaacggtttgctggtgtcatgttagaactgcttcagaaattgagtataactgctgctggaaaacgtgagaaacttctccgcacgatcaaaaaccccgtaacccaatatttgcccgtcaactctcgaaaaacaggtttatcttatagttcagagaagctggtagacatgaacaactatttgtcaacaattccaagcaatcaggaccttgtctttgtggtaggagcaatggcacatgggaaggttgagacagattacacggaagattatatagctgtttctggttaccctttaagtgctgcttattgtattacaaggattactaatgccattgagggaaagtggaacatattgtga

SEQ ID NO: 211 - protein, 282 aa, Medicago truncatula
MTRAYTLKGKKRKNKDAATKHDHEQEEEEEQQQQQIEPTPKKPNLHNDEPSAPTEESELPGIPIAPLNEKNSEKQGVIFILEKASLEVAKVGKTYQLLNSDEHSNFLRKHSKNPGDYRPDICHQALLSILDSPVNKAGRLKMVYIRTEKGVLIEVKPYVRIPRTFKRFAGVMLELLQKLSITAAGKREKLLRTIKNPVTQYLPVNSRKTGLSYSSEKLVDMNNYLSTIPSNQDLVFVVGAMAHGKVETDYTEDYIAVSGYPLSAAYCITRITNAIEGKWNIL

SEQ ID NO: 212 - DNA, 1155 bp, Gossypium hirsutum
ttcggcacgagctcacagccgtcgcttaaacagaatccatcgccgtccttgaacgcctcccccgtccgtcgatcggtttacgccctcttcgccgccgcccactgataaataatatttcaagccgacaaaatggtacgaccgtatgctattaaagggaagaaacggaagaatagaggcgagaagtatgataaaaaagaacaagaacatgaagaacaagtagaagaagaagaagagaaagaaccagcaaaacaagctgctattgaaaagccaacagaggaagtcgaaggtaaagaagaagaggaaggaggtgaagctggaacagatgaacttgagggaatcccaattgccccctctgataaaaagaataacaaaaatggggtaatttttgttcttgagaaggcttcattggaagttgctaaagttggaaagagttttcaactcttgaactcagatgatcatgccaatttcttgcggaaaaataacaagaatcctgctgattacagacctgacataacacatcaggctctactgtcgattctagatagtccggtcaataaggctgggagattgcaagctgtgtatgttagaactgagaaaggtgtactttttgaagttaaacctcatgttagaattccgagaacatataagcggttctctggtattatgttgcaactgctacaaaaactaaatataactgccgtcggcaagcgtgaaaagcttttacgagtgataaagaatcccgtaaccaattactttcctgtcaactctcgcaaaataggtttctcatatagctcagacaaattagctaaaatgaggaaatacgtagatgctgttggtgatgatgggaatcttgtttttgtggtgggtgcaatggcccatgggaaaatagaggtagattatatagatgattttatagcgagtaagttccacatttcttatctgtatgcttgttagattgttttgcgaaaatttcaaggatattgattagtaaccctcaaatcccataagaaccttcgaattgagcaagctaaggcaataagatagacgaaagctaaattaccaatgcttacttatattggatatagatagaaggtgtatgattctccaagaatatgcacttgctggaaccatacttgtagttgacgattatccaaa

SEQ ID NO: 213 - protein, 274 aa, Gossypium hirsutum
MVRPYAIKGKKRKNRGEKYDKKEQEHEEQVEEEEEKEPAKQAAIEKPTEEVEGKEEEEGGEAGTDELEGIPIAPSDKKNNKNGVIFVLEKASLEVAKVGKSFQLLNSDDHANFLRKNNKNPADYRPDITHQALLSILDSPVNKAGRLQAVYVRTEKGVLFEVKPHVRIPRTYKRFSGIMLQLLQKLNITAVGKREKLLRVIKNPVTNYFPVNSRKIGFSYSSDKLAKMRKYVDAVGDDGNLVFVVGAMAHGKIEVDYIDDFIASKFHISYLYAC

SEQ ID NO: 214 - DNA, 1363 bp, Asparagus officinalis
ggatcttctccaacctcggatccagccgccaccgccgctccaaagtccagccctaccgccctccgtcgacgcgctccgtctccgtctccgtctccgttaccgctgcgatccgtcaacccatctttgtttctcatttctgtatatttggattattacagggccaaactccggcgtttcctaggatctttgggcacgaagcaggagtgtaagaaattccttatgcatcttaagtcgtttgacagcgcacctccgaacccaaaagagtaagggagatggtgcgtccgtacgcagtcaaagggcgcaaaaagccaaagaagagaccgagagtcgaagaagaagaagaagaaaaagaagaacagcaacaagaagaaaacgatgaggcggtctctgagaaagagaatgaagaaaccctagaaaacgaagagaaaggagagtcgacggcggaggacgagagaaaagccgaggaggccatcgaagagatgccggggataccgatcgcgccgagggttcaggatcctaagaagaagcctggggtgatttttgtgctcgaaagggcgtgtctcgagttcgccaaggttggaaagacttaccagatcttgaactcagatgatcatgccaactttctgaagaagcagaatcgtaaccctgctgattacaggcctgatatcatacaccaggccctgctcgcaatactggacagccccctaacaaaggcaggaaggttacaagccctatatgtaagaactgaaaagggagtactttttgaagttaaaccacatgttcgcatgccacgaacatttaagagattttgtggtctcatgctccagctacttcaaaatttgagtattactgcctcaggaaaacgtgagaaacttctaaatgtcataaagaatcctgtaacacgtcatttgccctgtcaattcacgaagaattggcttatcatatagttcagagaaaatggttcaaatgagagattatgtggctgctgctagtgatgatgtcaaccttgtgttcgtggtgggtgctatggcacatggaaagattgataatgattatacagatgactttatatcaatttctaattacccgctaagtgcagcttgctgcttaggcaggatatgcaatgctttggagcacaaatggaacatattatgattaatataagacttccatctatggcttaatatacttccctcgtattaattgatatcataaattttgtatgcggttgttgctttcattacagtaatcatgtagtgagattgttgttgctacaatggatgttgattagaggcagtagcaagaaagcaatatgtataagattttgattgcttgttttttaggctttcctaaagtttatccc

SEQ ID NO: 215 - protein, 224 aa, Asparagus officinalis
MVRPYAVKGRKKPKKRPRVEEEEEEKEEQQQEENDEAVSEKENEETLENEEKGESTAEDERKAEEAIEEMPGIPIAPRVQDPKKKPGVIFVLERACLEFAKVGKTYQILNSDDHANFLKKQNRNPADYRPDIIHQALLAILDSPLTKAGRLQALYVRTEKGVLFEVKPHVRMPRTFKRFCGLMLQLLQNLSITASGKREKLLNVIKNPVTRHLPCQFTKNWLII

SEQ ID NO: 216 - DNA, 1183 bp, Glycine max
agggcagaaacaaaagcataaccctagctaggacgtgtttggagttggtttgagcgtattgaggcaatgacgcgaccttacggtgtgaaggggggccggaagcgaaagcacgccgaacccaaatacgacgaagaagaccaagaaacgcaaccaaaaaaagctgtggtggaggtggagcacaacaaagaagaagaacaacagcaacaaacaccagagggggatgaattgagcggtatcccaattacgcccagtgagaacaacaccaacaaacccaacgtcatcttcattctagaaaaagcttctttggaagtcgccaaagtcggcaagacatatcagctcttaaactccgacgaccatgccaatttcctccgcaaaaataacaagaatcccggagattacaggcctgacattactcatcagtcccttttatctattttggatagcccactaaataaagctgggagattgcggtcggtatacataaggactgaaaaaggtgttcttatagaggttaagccctttgttcgtattccaagaacattcaaacgctttgctggtgtcatgttggaattgcttcaaaaattgagcatatctgctgttggcaagcgcgagaaacttctccgaaccatcaaaaaccctgtcacgcagtatttgcctatcaactcacgaaaaataggtctatcgtatagttcagaaaagcttgtagatatggatgactatgtatcaactgttcccagcaatatggaccttgtctttgtggagcaatggcccatgggaagattgagacagattatacagaagattatgtagcaatttcggggtaccctctaagtgctgcttattgtattacaaggattactggtgcccttgagagaaagtggaagattttgtgatttaacaccaccttcagttcatgcatgagagacgatttagtaataccagttccgtagtcaatttatgtaatacaagggatagggccttgcctagcagtgatataggaaataatttttttctgaggcattgatgtcctggaccagagcgatgtttcaatgtagtacttaaattaaatatgactagtatattattttgttaaaggatgcttatagaagccaaatctaaatgttgcttatactgcgctgagatacgctgcttgggagttactatttttttccttgttcaaacc

SEQ ID NO: 217 - protein, 247 aa, Glycine max
MTRPYGVKGGRKRKHAEPKYDEEDQETQPKKAVVEVEHNKEEEQQQQTPEGDELSGIPITPSENNTNKPNVIFILEKASLEVAKVGKTYQLLNSDDHANFLRKNNKNPGDYRPDITHQSLLSILDSPLNKAGRLRSVYIRTEKGVLIEVKPFVRIPRTFKRFAGVMLELLQKLSISAVGKREKLLRTIKNPVTQYLPINSRKIGLSYSSEKLVDMDDYVSTVPSNMDLVFVEQWPMGRLRQIIQKIM

SEQ ID NO: 218 - DNA, 1103 bp, Curcuma longa
cgccgccgagcagagatggttcggccctacgcagtgaaggggagaaagctcatcagttggagagtcgaagaaccagcgccgcctgaggaggagaaggtagaagatgcctccgacgatggagaaagggaaggcgatcaagctgcttttgagactggagtcgaggtagaggagaacgaggacgagaggcggacggaggaagctttggacaagattcctgtcctaccgatcactggacctgttgacagagccaagcggccgggcgtcatattcgtcctcgaaaaggcttgtctggaggtcggaaaagtcggaaagaatttccaaattctgaactcagatgaccatacaaattatttgaagaagcagaatcgcaaccctgctgattataggccagacatcattcaccaggctcttcttgcaatatttgatagtcccttagctaaggccggtaggttgcaagctgtttatgtgaaaacagagaaaggagttctttttgaaattaaaccacatgttcgcataccgaggaccttcaagcgcttctgtggtcttatgtcacaattgttacaaaagttaagcataacagctgttgggaagcgtgagaaacttcttaacgttataaaaaacccagtgactcgtcacttgcccgtcaattccaagaaaataggactctcttatagttcagacaagctggttaacttatccaattatgttgctgctgctagtgatgatgctccgcttgtttttgtggttggtgcaatggctcatggagtgatcagtaaggaatacattgatgattttgtatccgtatcaaaataccccttgagcgcggcatgctgtttgaacaggatttgcagtgcatttgagcagaagtggaagatcacataaaaacgttacatgatagttttattatcattcgccttgataggcgacttgttctgtaatttcaattagcaagcttacaactgctgaaggtttcaccactttttgtatgataagagctgttacatgttgcatggtaggatgatttcttgataacaagagtatttatcaaattattcatcaaacaaaaatcaacctcgtgccgaattcggcacgaggcatggtgc

SEQ ID NO: 219 - protein, 288 aa, Curcuma longa
MVRPYAVKGRKLISWRVEEPAPPEEEKVEDASDDGEREGDQAAFETGVEVEENEDERRTEEALDKIPVLPITGPVDRAKRPGVIFVLEKACLEVGKVGKNFQILNSDDHTNYLKKQNRNPADYRPDIIHQALLAIFDSPLAKAGRLQAVYVKTEKGVLFEIKPHVRIPRTFKRFCGLMSQLLQKLSITAVGKREKLLNVIKNPVTRHLPVNSKKIGLSYSSDKLVNLSNYVAAASDDAPLVFVVGAMAHGVISKEYIDDFVSVSKYPLSAACCLNRICSAFEQKWKIT

SEQ ID NO: 220 - DNA, 1216 bp, Hordeum vulgare
cacgaggctagactcaaagccccgcaggccgcagcccgagccgtcgcgaagcgtgaagaagacatggggcggccgtacgcagtcaaggggaagaagaagcggaagctggaaggcggcgaagcctcgcgcgcccctccggtcgacgccgaggaggtggagctagagggcaaggaaaatgaggaggtgacggagggggaggcggcgccagaggcctttgccgaggaggtgggggatgggatccccatcgtgccccgcccgctggacagtaagcggcggccgggcgctatcttcgtacttgagagggcctgcctcgaggtcggcaaagtcggcaagggtatgcaaatcttgaattcggatgatcacgctaattatttaaggaagcagaatcgcaatccagctgattataggcctgatatcatccaccaggcactactagcaatatttgatagccccctaactaaggctggcaggttacaagctgtttatgttaggactgaaaagggagtgttgtttgaaatcaagcctcatgttcgcatgccacggacgttcaagcgtttctgtggtttgatgtcacagttattgcaaaagctgagcatcacggcagttgggaagcgtgagaagctccttaatgttattaaaaatcctgttacccagtatctacctgttggcacacggaagattggcctttcatatagtgcggagaaggcagttaatttgtgtgactatgttgctaagtccaatgatgatgaacctcttgtgtttgtggttggtgccatggcccatggaaaggttgacaaggaatactcagatgattacatacagattagcggttaccctctcagtgctgcctgttgcctgaatcgaatatgcagtgccttggagcagaaatggagcatccagtgaagggaagattgaaaacgaatattacagctttgtgatcagatttttatgtacccattagctctaatagtctcgttgtgccttttcaagtcttatatgtctaccgtattagttttgtcggagacatgaatcagtggctgtaaaagtattaacattgaatgtttcaagtgcttatggtccttgcagtcaagtcatttttggtgaaatttactttgcttgaagcgtcctcaactgatgtttaaacatagctgggccacatttacgcccaaaatctcgtgggcgtgtgttggttcgctgctgcgcagccagaggcgtg

SEQ ID NO: 221 - protein, 279 aa, Hordeum vulgare
MGRPYAVKGKKKRKLEGGEASRAPPVDAEEVELEGKENEEVTEGEAAPEAFAEEVGDGIPIVPRPLDSKRRPGAIFVLERACLEVGKVGKGMQILNSDDHANYLRKQNRNPADYRPDIIHQALLAIFDSPLTKAGRLQAVYVRTEKGVLFEIKPHVRMPRTFKRFCGLMSQLLQKLSITAVGKREKLLNVIKNPVTQYLPVGTRKIGLSYSAEKAVNLCDYVAKSNDDEPLVFVVGAMAHGKVDKEYSDDYIQISGYPLSAACCLNRICSALEQKWSIQ

SEQ ID NO: 222 - DNA, 784 bp, Euphorbia esula
  misc_feature (701)..(705): n is a, c, g, or t
gtgagtgtcttccgcagccaaagatatacatttcgacgacaatccggtgattattccggtcacttgcaacttcaaagcaatggtgcggcttcatggaataaaagggccctagaggaaaaagagagaggagaagtatgataaggaggaagatgaagcagatgagcaacaaaatgaaccagaaaatgaagaacaaaaagatgaaatggaacaagtggaagagcaatcttatgaaatggagggtattccatctgttcccagtgatcaatatgctaaaaaacctggagtcattttcgttcttgagaaggcttctttggaagttgccaaagttggaaagatttatcaaatcttgaactctgatgatcattcaaatttcttgcggaagcataaaaaagatcccgctgattataggccggatattgtttttcaggcacttttatcaatcttagatagccccataaataaggctggaaggttgagagctgtctatgtgaaaacagataaaggtgttctatttgaagtcaaaccacatgtacgaatacctaggacttataagcgatttgctggagttatgttgcaactgcttcaaaaactgagcattagcgctatgggaaaacgtgagaaacttttgcgtgtgattaagaatcctgtgaccccgtacctgcctctaaactctcataaaatagggttctcttttagctcgnnnnnattggttaaaatgaacaagtatgttactacagttggtgatgataaggacctggtttttgtggttggtgcaatggcccat

SEQ ID NO: 223 - protein, 194 aa, Euphorbia esula
  misc_feature (167)..(168): Xaa can be any naturally occurring amino acid
MEQVEEQSYEMEGIPSVPSDQYAKKPGVIFVLEKASLEVAKVGKIYQILNSDDHSNFLRKHKKDPADYRPDIVFQALLSILDSPINKAGRLRAVYVKTDKGVLFEVKPHVRIPRTYKRFAGVMLQLLQKLSISAMGKREKLLRVIKNPVTPYLPLNSHKIGFSFSSXXLVKMNKYVTTVGDDKDLVFVVGAMAH

SEQ ID NO: 224 - DNA, 858 bp, Sorghum bicolor
atggggcggccttacggggtgaagggacggaagaagaagcgcaagctcgaggaggcggcgacctctgacgctgctccgcccgctgaagaggtggaggagctgccaccacaagaggaggccggtggcgaggagaagggcaacgaggaggatgaggcagcggctggggaggaggagcacgctgcggtggacgggatcccaatcgtacccagaacgcttgatgggaagcggcggcctggcgctatcttcgtgctcgagagggcctgcctcgaggtcggcaaagtcggcaagactatgcaaatcttgaactcagatgatcatgcaaattatttgaggaagcagaatcgcaatcctgcagattataggcctgatataattcatcaggctctactagcaatatttgatagccctctgactaaggctggaaggttacaggctgtttatgtgaggactgaaaagggagtattgtttgaaatcaaacctcatgttcgcatgccaagaacgtttaaacgtttctgtggtttaatgtcacaattgttacaaaaactgagcattacggcagttgggaagcgtgagaaacttcttaatgttgttaaaaatcctgttacccgctatctacctgttggtgcacgaaagattggcctttcatttagtgctgagaagtcagtcaacttgtttgactatgttgccaaatccagtgatgatgaaccccttgtgtttgtggttggtgccatggcccatggaaagatcgacaaggaatacacagatgattacatacaaatttgcaactaccctctcagtgccgcctgctgtttaaatcggatatgcagtgccctggagcaaaagtggaacatccaatga

SEQ ID NO: 225 - protein, 285 aa, Sorghum bicolor
MGRPYGVKGRKKKRKLEEAATSDAAPPAEEVEELPPQEEAGGEEKGNEEDEAAAGEEEHAAVDGIPIVPRTLDGKRRPGAIFVLERACLEVGKVGKTMQILNSDDHANYLRKQNRNPADYRPDIIHQALLAIFDSPLTKAGRLQAVYVRTEKGVLFEIKPHVRMPRTFKRFCGLMSQLLQKLSITAVGKREKLLNVVKNPVTRYLPVGARKIGLSFSAEKSVNLFDYVAKSSDDEPLVFVVGAMAHGKIDKEYTDDYIQICNYPLSAACCLNRICSALEQKWNIQ

SEQ ID NO: 226 - DNA, 1647 bp, Panicum virgatum
cacaaatctcagccgccagcgagggacacgcctcgagcctcgagcagcgaggcgagcaagggagagctaaagagagatggggcggccgtacgcggtgaaggggcgcaagaagaagcgcaaggtcgacgaggcggcggcctcggacgccgccccgcccgccgaagaggcggaggagctgccgccgccggaggaggctggcggcgaggaaaaggagggggaggatggggcggcagcggtggtggagggggaggagcacgcggcggtggaggggctcccggtcgtgccaaggccggtggacgggaagcggcggcccggcgccatcttcgtgctcgagagggcctgcctcgaggtcggcaaagtcggcaagactatgcaaatcctgaactcagatgatcatgctaattatttgaggaagcagaatcgcaatcctgctgactataggcctgatatcattcatcaggctctactggcgatatttgacagccctttaacaaaagctggaaggttacaggctgtttatgtgaggactgaaaagggagtactgtttgaaatcaaacctcatgtccgcatgccacgaacatttaaacgcttttgtggtttaatgtctcaattgttgcaaaagctgagcattacagcagttgggaagcgtgagaagcttcttaatgttgttaaaaatcctgttacccgctatctacctgttggtgcccggaaaattggcctttcatttagcgctgagaagtcagtcaacttgtttgactatgttgccaaatccagtgatgatgaacctcttgtgtttgtggttggtgccatggcccatggaaagatcgacaaggaatacacagatgattacatccaaatttgcaactaccctctcagtgctgcctgttgtttaaatcggatatgcagcgccctggagcagaagtggaacatcagatgaatggaaattttgaaacagacatctatgtactcgatggctagtgcccagtagcactgtgttttttccatccttcatgtactgccttttttttgggccatacagaaacaagaaattctccaaaacaactgcaggatctaaggtagcgtttggttggagagcaggtagaatggaacagatcctaaagcgtcccctcataagagaaaacttaaatgtgatactaacatcagtcccaggaggctgatgacacatttattacatcagatggttcatcaccgtacaactctacgcggtaatgggcagagaagcgccactatcgcgaggattacaacccacacccacacaacgatattaattataaaaagagggtcatcagagtcttgcgtcatgcggtatctcctgcgggtgaccctaatccacatgcaaagctgggtgcaggacggtaccctactcaacgtcctctggaacgaagtctgggtcttcctctgagccttcggggtcttcttggcctccagacatcgtgcccagcaccggccgcccagagatccgagaaatggcaagctcccacggcgcggccggtgacagatgcgggaggagtagtaggctggtagctcgggtccctgtgtggctatgcagaagcggaggaggaatctggaggcgctgtggtgcggctgccggcgggaacggcggcgaggcgggggcgcgatgtggcc

SEQ ID NO: 227 - protein, 286 aa, Panicum virgatum
MGRPYAVKGRKKKRKVDEAAASDAAPPAEEAEELPPPEEAGGEEKEGEDGAAAVVEGEEHAAVEGLPVVPRPVDGKRRPGAIFVLERACLEVGKVGKTMQILNSDDHANYLRKQNRNPADYRPDIIHQALLAIFDSPLTKAGRLQAVYVRTEKGVLFEIKPHVRMPRTFKRFCGLMSQLLQKLSITAVGKREKLLNVVKNPVTRYLPVGARKIGLSFSAEKSVNLFDYVAKSSDDEPLVFVVGAMAHGKIDKEYTDDYIQICNYPLSAACCLNRICSALEQKWNIR

SEQ ID NO: 228 - DNA, 843 bp, Sorghum bicolor
atggtgcggccttacgcggtgaaggggcggaagaagaagcgcaagctcgaggaggcgtcggcctcgggcgctgccccgcccgccgaagaagcagaggagctgccaccgccagaggtgggcagcggcgaggaggatgaggcagcggcggggaaggaggagcacgcggcggcggacgggctcccaatcatacccaggacagttgatgggaagcggcgacccggcgccatcttcgtgctcgagagggcctgtctcgaggtcggcaaagtcggcaagactatgcaaatcttgaactcagatgatcatgcaaattatttgaggaagcagaatcgcaatcctgcagattataggcctgatatcattcatcaggctctactagcaatatttgatagccctctaactaaggctggaaggttacaggctgtttatgtaaggactgaaaagggagtattgtttgaaatcaaacctcatgtccgcatgccaagaacatttaaacgtttctgtggtttaatgtcacaattgttacaaaaactgagcattacggcagttgggaagcgtgagaagcttcttaatgttgttaaaaatcctgttacccgctatctacctgttggtgcacgtaagattggcctttcatttagtgctgagaagtcagtcaacttgtttgactatgttgccaaatccagtgacgatgaaccccttgtgtttgtggttggtgccatggcccatggaaagatcgacaaggaatacacagatgactacatacaaatttgcaactaccctctcagtgccgcctgctgtttaaatcggatatgcagtgctctggagcagaagtggaacatccaatga

SEQ ID NO: 229 - protein, 280 aa, Sorghum bicolor
MVRPYAVKGRKKKRKLEEASASGAAPPAEEAEELPPPEVGSGEEDEAAAGKEEHAAADGLPIIPRTVDGKRRPGAIFVLERACLEVGKVGKTMQILNSDDHANYLRKQNRNPADYRPDIIHQALLAIFDSPLTKAGRLQAVYVRTEKGVLFEIKPHVRMPRTFKRFCGLMSQLLQKLSITAVGKREKLLNVVKNPVTRYLPVGARKIGLSFSAEKSVNLFDYVAKSSDDEPLVFVVGAMAHGKIDKEYTDDYIQICNYPLSAACCLNRICSALEQKWNIQ

SEQ ID NO: 230 - DNA, 1269 bp, Zea mays
aactgattagtaactaataattgcttacatattagtcattgcccatataaatataaatggagttctttgtgtcaaatgaacgctagctgaaccctagccggcggatctccgcgggcggcagtcaggagtggaggcgtggtcgcacgggcgaggtcgcaataggagaggctcagagagatggggcggccttacgcggtgaaggggcggaagaagaagcgcaagctcgaggaggcggcggcggcctcggacgctgccccgcccgtcgaagaagcggaggagctgccaccgccagaggtgagaagcggcgaggaaaagagcagcgaggaggatgaggcagcagcgggggaggaggagcacgcggcggcggacgggctcccaatcctacccaggacggttgatgggaagcggcgacccggcgccatcttcgtactcgagagggcctgcctcgaggtcggcaaagtcggcaagactatgcaaattttgaactctgatgatcatgcgaattatttgaggaagcagaatcgcaatcctgcagattataggcctgatatcattcatcaggctctactagcaatatttgatagccctctaactaaggctggaaggttacaggctgtttatgtgagaactgaaaagggcgtattgtttgaaatcaaacctcatgtccgcatgccaagaacctttaaacgtttctgtggtttaatgtcacaattgttgcaaaaactgagcattacggcagttggaaagcgtgagaagcttctcaacgttgttaaaaatcctgtcactcgttatctacctgttggtgcacgtaagattggcctttcatttagtgctgagaagtcagtcaacttgtttgactatgttgccaaatccaatgacgacgaacctcttgtgtttgtggttggtgccatggcccatggaaagatcgacaaggaatatacagatgattacatacaaatttgcaactaccctctcagtgctgcctgctgtttaaatcggatatgcagtgccctggagcagaagtggaacatccaatgaggaacttttgacaagcatgggaatcttgttttattatatacatcttacatgtacttccctctgcttatgtacaatgtttgaaagttaaaaccaaatgtttcagtgtggcattatgacgtgttttagacatcaattcatggctttaaactggtttgttcagagtcattttagcaaaaactgagtgttctgcatgccaaacttcggttaactcaaacattggtgtcagatctt

SEQ ID NO: 231 - protein, 286 aa, Zea mays
MGRPYAVKGRKKKRKLEEAAAASDAAPPVEEAEELPPPEVRSGEEKSSEEDEAAAGEEEHAAADGLPILPRTVDGKRRPGAIFVLERACLEVGKVGKTMQILNSDDHANYLRKQNRNPADYRPDIIHQALLAIFDSPLTKAGRLQAVYVRTEKGVLFEIKPHVRMPRTFKRFCGLMSQLLQKLSITAVGKREKLLNVVKNPVTRYLPVGARKIGLSFSAEKSVNLFDYVAKSNDDEPLVFVVGAMAHGKIDKEYTDDYIQICNYPLSAACCLNRICSALEQKWNIQ

SEQ ID NO: 232 - DNA, 1111 bp, Triticum aestivum
ggggacgaaggagaagaaccctaggcggctccctgtgactcaaccccccgcagcccggcgccggcgcgaagcgagaagaaggcatggggcggccgtacgcagtgaaggggaagaagaagcggaagctggaaggcggcgaagcctcgcgcgcccctccggtcgacgccgaggcggtggagcaagaggtgaaggaaaatgaggaggtgatggagggggaggcggcggcagaggaagcttttgccgaggaggtgggggaggggatccccatcgtgccccgcccggtcgacagtaagcggcggccgggcgctatcttcgtacttgagagggcctgcctcgaggtcggcaaagtcggcaagggtatgcaaatcttgaattcggatgatcacgcaaactatttaaggaagcagaatcgcaatccagctgattacaggcctgatatcattcaccaggcactactagcaatatttgatagccctctaactaaggctgggaggttacaagctgtttatgttaggactgaaaagggagtgttgtttgaaatcaagcctcatgttcgcatgccacggacattcaaacgtttctgtggcttgatgtcacagttattgcaaaagctgagcatcacggcagttgggaagcgcgagaagctccttaatgttattaaaaatcctgttacccagtatctacctgttggcgtacggaaaattggcctttcatatagtgcggagaaggcagttaatttgtttgactatgttgctaagtccaatgatgatgaacctcttgtgtttgtggttggtgccatggcccatggaaaggttgacaaggaatactcagatgattacatacagattagcggttaccctctcagtgctgcctgctgcctgaatcgaatatgcagtgccttggagcagaaatggaacatccagtgaagggaagtttgaaaacgaacattacatctttgtgttcagatttttatgtactcgttagcgcttatagtgttgttgtgctttttcatgtcttatgtctacaatattagttttgtcgagacatgaatcactggctgtaaaagtattaacactgaatgtttcaagtgcttatgttccttgcagcagtc

SEQ ID NO: 233 - protein, 280 aa, Triticum aestivum
MGRPYAVKGKKKRKLEGGEASRAPPVDAEAVEQEVKENEEVMEGEAAAEEAFAEEVGEGIPIVPRPVDSKRRPGAIFVLERACLEVGKVGKGMQILNSDDHANYLRKQNRNPADYRPDIIHQALLAIFDSPLTKAGRLQAVYVRTEKGVLFEIKPHVRMPRTFKRFCGLMSQLLQKLSITAVGKREKLLNVIKNPVTQYLPVGVRKIGLSYSAEKAVNLFDYVAKSNDDEPLVFVVGAMAHGKVDKEYSDDYIQISGYPLSAACCLNRICSALEQKWNIQ

SEQ ID NO: 234 - DNA, 1346 bp, Glycine max
gttgattgtttgaattaaaagcgtgaaagcccattttggaagaagctgaagcccacaaacaagaaaaagaagtgacatgctcattcacataatccctctctccgctgcttatcggaatcggcatggtccaaccggcgccggcgatgactcagttcctcaactccgtcctttcccagcgcggcccctccgcggtcccttactcagaggacaccgagtggttcatccgctagcacctcgtggcgctcaccactgccttcccttccctcgtgcccaaacggcgtcgttcacccacaacgacggccgttccgtcaacctcctccaggccgacggcaccatcccgatgacgttccaaggcgtcacctacaacgtccccgtcgtcatctggctcgcggaatcctacccccgcctcccgccctgcgtctacgtcaatcccacgcgcgacatgatcatcaagcgccctcaccctcacgggggccggaagcgaaagcacgccgaacccaaatacgacgaagaagaccaagaaacgcaaccaaaaaaagctgtggtggaggtggagcacaacaaagaagaagaacaacagcaacaaacaccagagggggatgaattgagcggtatcccaattacgcccagtgagaacaacaccaacaaacccaacgtcatcttcattctagaaaaagcttctttggaagtcgccaaagtcggcaagacatatcagctcttaaactccgacgaccatgccaatttcctccgcaaaaataacaagaatcccggagattacaggcctgacattactcatcagtcccttttatctattttggatagcccactaaataaagctgggagattgcggtcggtatacataaggactgaaaaaggtgttcttatagaggttaagccctttgttcgtattccaagaacattcaaacgctttgctggtgtcatgttggaattgcttcaaaaattgagcatatctgctgttggcaagcgcgagaaacttctccgaaccatcaaaaaccctgtcacgcagtatttgcctatcaactcacgaaaaataggtctatcgtatagttcagaaaagcttgtagatatggatgactatgtatcaactgttcccagcaatatggaccttgtctttgtggtaggagcaatggcccatgggaagattgagacagattatacagaagattatgtagcaagtgtgtattagctgattgccatgtctctttatgtatgaactttgtacttgtgagttcatgaaattttgcaaaacttaaactggttatggcacctgttctcgctcatctgccttcctttgtaactttaactactaaatgcaggtttatgaa

SEQ ID NO: 235 - protein, 376 aa, Glycine max
MLIHIIPLSAAYRNRHGPTGAGDDSVPQLRPFPARPLRGPLLRGHRVVHPLAPRGAHHCLPFPRAQTASFTHNDGRSVNLLQADGTIPMTFQGVTYNVPVVIWLAESYPRLPPCVYVNPTRDMIIKRPHPHGGRKRKHAEPKYDEEDQETQPKKAVVEVEHNKEEEQQQQTPEGDELSGIPITPSENNTNKPNVIFILEKASLEVAKVGKTYQLLNSDDHANFLRKNNKNPGDYRPDITHQSLLSILDSPLNKAGRLRSVYIRTEKGVLIEVKPFVRIPRTFKRFAGVMLELLQKLSISAVGKREKLLRTIKNPVTQYLPINSRKIGLSYSSEKLVDMDDYVSTVPSNMDLVFVVGAMAHGKIETDYTEDYVASVY

SEQ ID NO: 236 - DNA, 1242 bp, Oryza sativa
aaaaccctagctttcctccccctcgaaaccccaccacaccactgcaacgcgtgcgagcggcggcgagaggaaggaggagaccgatggggcggccgtacgcggtgaaggggcggaagaagaagcggaagctcgacgacggcggggcctcccgcgagcccccggtcgacgaagaggcggcggaggagctgccgccgccggagggggtggaggaggaggaggggaaggaggaggacgtggcggcggcggcggcggccggggaggttgctgatgggctacccgtcgtgccacggccggtggacgggaagcggcggcccggcgcgatcttcgtgctcgagagggcctgcctcgaggtcggcaaagtcggcaagactatgcaaatcctgaactcggatgaccatgctaattatttgaggaagcaaaacaggaatccagctgattacaggcctgatatcattcaccaggctcttcttgcaatatttgatagcccactaactaaagctgggaggttacaagctgtttatgttaggactgaaaagggagtattgtttgaaatcaagccttacgtccgcatgccacgtacattcaaacgtttttgcggtttaatgtcacaattattgcagaagttgagcattacagcagttggaaagcgggagaagcttcttaatgtcattaaaaatccagtcacccgctatctaccagttggagcaaagaagattggtctttcatatagtgctgagaagtcagtcaatttgtttgactatgttgccaaatccagtgacgatgtaccccttgtgtttgtggtaggtgctatggctcatggaaagattgacaacgaatactcagatgattacatacaaatttgcaattaccctctcagtgctgcctgctgtttgaatcgaatatgcagtgctctcgagcagaagtggaacatccagtgaaaggaaattttgaaaacgaacactgaaaaacattatgtgaaattgttgtgtactcgctagctaatgcaattttgcggtctcctcccatgctgagtgtgtactgtattctgattgtggagacttgaaaactccggtggtaatagtgttaaagttcaatgtttgtcgcaacaatatgttacatcttgaggcatactgttgcttatgattaccaccagccttgagctaggttggttgaaaaccgaactgcaacgtttgtcctttgccccaaaattttacgctgagctgagatttacccgcattaaca

SEQ ID NO: 237 - protein, 284 aa, Oryza sativa
MGRPYAVKGRKKKRKLDDGGASREPPVDEEAAEELPPPEGVEEEEGKEEDVAAAAAAGEVADGLPVVPRPVDGKRRPGAIFVLERACLEVGKVGKTMQILNSDDHANYLRKQNRNPADYRPDIIHQALLAIFDSPLTKAGRLQAVYVRTEKGVLFEIKPYVRMPRTFKRFCGLMSQLLQKLSITAVGKREKLLNVIKNPVTRYLPVGAKKIGLSYSAEKSVNLFDYVAKSSDDVPLVFVVGAMAHGKIDNEYSDDYIQICNYPLSAACCLNRICSALEQKWNIQ

SEQ ID NO: 238 - DNA, 1039 bp, Cryptomeria japonica
gttaaaattccgatacaagggcaccatattttagtagaaagaatggaagaatctttgaagcgaaagagagaggacgacgacgaggaagatgaagtactggcgggtttgggagccgcctgtcctccagctaacaacaatagcgacggaggagttgtttttgtgctgctgaaggcgtccctcgaggttggcaaagttggcaagatataccagctgttgaactgtgatgaccatgttcattttttgaaaaagaacaaacagaatccagcagaatatcgacctgatattgttcaccaggcacttttggcaattttggatagtcctctcaataaggctggaaggcttagcgctgtttatgtgcaaactaagaagaatatccttatcaaagtaaacccccatgttcgtcttccaagaaccttcaagcgtttttgtggattgatggtgcaactgctacagaaactgagcattcgtgcaactaatggtccagatagactcctccgtgtgatcaagaatccagtcacaaagtatctgccaagtgaagctcgtcgggttgggctgtcacacagtgcatctaaagtagtacaacttcatgactatgttgaagctgtccgtgataatgttccccttgtgtttgtggttggggctatgtctcacgggaagattgatgcagactatttagacgattttatctcaatttcacaatatccactcagtgctgcatgttgcataggccgcatttgcaatgcaattgaacggaagtggaaaatactgtgagggtgagcaagtcacttatacaatcatcaatggcaaattcatctgtagacattttacattctttctggtgatcagttatgttgattaacaggtcatcatgttttctatgctcaaaatgggccatatacatatattccattgttacttgcatttccataaatgtaattctctcggtgaaaatgattgtttaaatattctcctctacctgaagtgtgtctttttgttttttaatcttgattcaacgataagttttgtttccctaagttat

SEQ ID NO: 239 - protein, 242 aa, Cryptomeria japonica
MEESLKRKREDDDEEDEVLAGLGAACPPANNNSDGGVVFVLLKASLEVGKVGKIYQLLNCDDHVHFLKKNKQNPAEYRPDIVHQALLAILDSPLNKAGRLSAVYVQTKKNILIKVNPHVRLPRTFKRFCGLMVQLLQKLSIRATNGPDRLLRVIKNPVTKYLPSEARRVGLSHSASKVVQLHDYVEAVRDNVPLVFVVGAMSHGKIDADYLDDFISISQYPLSAACCIGRICNAIERKWKIL

SEQ ID NO: 240 - DNA, 1170 bp, Picea sitchensis
ggaaaacaaattatcatttgtttttcagattgacgagatggatggaggtattaagcgtaagagaagcagggaagaagacgaagatgcggcaggagcagcaacacaagacatagaaactgagctagtgggattgccagcgctgcctaccatcaaaaagggcggagaaggagtgatttttattctggaaaaggcatccttggaggttgccaaagtcggcaagacataccaacttttgaatgttgatgaccatggtcatttcctgcggaaacacaaacaggacctagcaacatttcggcctgatattgttcaccaggctctattggcaattttggatagccctcttaacaaggctggaaggcttagtgctgtttatgtgcaaactcagaagaaagtgcttatacaagtgaatccccatgttcgtcttccaagaaccttcaagcgtttttgtgggttgatggtgcaacttctgcaaaaactgagcattcgtgcgactaatgggccagataaaatcctacgtgtgataaaaaatccagtcacaaaacatctacccagtgaagctcgtcgaattgggttatcatacagtgcacccaaagtagttaagcttcatgactatgttgctgcttccagtgacaagattcccctcgtatttgtggttggggcaatggctcatgggaagattaatgcagattacattgatgattttatctcaatttcagaatatcctctcagtgctgcatgttgcataggccgcatctgcaatgcagttgagcagaagtggaaaattttgtaggagtgagcaagtaatttctgtaaacatctttagcaaatctaatggaagatgtttgatttggttgccaggaacagtgctttctgcctatgcttagaatccaaccgagttgtatgctaacagatcaatgttttttagatcaatttgttttgtattctcaaagtggataatgtaagcatatttcaatattattcacatttccgattaatgtattagttattggtcaaataactttattttccaattcttctcattatctgtttgtaaacatggctgtaaggtagaggagaagtacaatgtaatgtgttttaagagaaaatgtggtcgaagtaagcttattacagtattttttgcatttatattaatataatgccaaatatttt

SEQ ID NO: 241 - protein, 250 aa, Picea sitchensis
MDGGIKRKRSREEDEDAAGAATQDIETELVGLPALPTIKKGGEGVIFILEKASLEVAKVGKTYQLLNVDDHGHFLRKHKQDLATFRPDIVHQALLAILDSPLNKAGRLSAVYVQTQKKVLIQVNPHVRLPRTFKRFCGLMVQLLQKLSIRATNGPDKILRVIKNPVTKHLPSEARRIGLSYSAPKVVKLHDYVAASSDKIPLVFVVGAMAHGKINADYIDDFISISEYPLSAACCIGRICNAVEQKWKIL

SEQ ID NO: 242 - DNA, 1012 bp, Picea glauca
  misc_feature (961)..(965): n is a, c, g, or t
  misc_feature (999)..(1001): n is a, c, g, or t
gcagcaacacaagacatagaaactgagctagtgggattgccagcgctgcctaccatcaaaaagggcggggaaggagtgatttttattctggaaaaggcatccttggaggttgccaaagtcggcaagacataccaacttttgaatgttgatgaccatggtcatttcctgcggaaacacaaacaggacctagcaacatttcggcctgatattgttcaccaggctctattggcaattttggatagccctcttaacaaggctggaaggcttagtgctgtttatgtgcaaactcagaagaaagtgcttatacaagtgaatccccatgttcgtcttccaagaaccttcaagcgtttttgtgggttgatggtgcaacttctgcaaaaactgagcattcgtgcgactaatgggccagataaaatcctacgtgtgataaaaaatccagtcacaaaacatctacccagtgaagctcgtcgaattgggttatcatacagtgcacccaaagtagttaagcttcatgactatgttgctgcttccagtgacaagattcccctcgtatttgtggttggggcaatggctcatgggaagattaatgcagattacattgatgattttatctcaatttcagaatatcctctcagtgctgcatgttgcataggccgcatctgcaatgcagttgagcagaagtggaaaattttgtaggagtgagcaagtaatttctgtaaacatctttagcaaatctaatggaagatgtttgatttggttgccaggaacagtgctttctgcctatgcttagaatccaaccgagttgtatgctaacagatcaatgttttttagatcaatttgttttgtattctcaaagtggataatgtaagcatatttcaatattattcacatttccgattaatgtattagttattggtcaaataactttattttccaattcttctcattatctgtttgtaannnnngctgtaaggtagaggagaagtacaatgtaatgtnnntaagagaaaat

SEQ ID NO: 243 - protein, 111 aa, Picea glauca
MVQLLQKLSIRATNGPDKILRVIKNPVTKHLPSEARRIGLSYSAPKVVKLHDYVAASSDKIPLVFVVGAMAHGKINADYIDDFISISEYPLSAACCIGRICNAVEQKWKIL

SEQ ID NO: 244 - DNA, 781 bp, Euphorbia esula
  misc_feature (5)..(7): n is a, c, g, or t
  misc_feature (741)..(745): n is a, c, g, or t
gccannntctttatccaagtatagtataggggctgagcaaagtgagtgtcttccgcagccaaaaatatacatttcgacgacaatccggcgattattccggtcacttgcaacttcaaagcaatggtgcggcttcatggaataaaagggcccaagaggaaaaggagagaggagaagtatgataaggaggaagatgaagcagatgagcaacaaaatgaaccagaaaatgaagaacaaaaagatgaaatggaacaagtggaagagcaatcctatgaaatggagggtattccatctgttcccagtgatcaaaatgcgaaaaaacctggagtcattttcgttcttgagaaggcttctttggaagttgccaaagttggaaagatttatcaaatcttgaactctgatgatcattcaaatttcttgcggaagcataaaaaagatcccgctgattataggccggatattgtgtttcaggcacttttatcaatcttagatagccccataaataaggctggaaggttgagagctgtctatgtgaaaacagataaaggtgttctatttgaagtcaaaccacatgtacgaatacctaggacttataagcgatttgctggagttatgttgcaactgcttcaaaaactgagcattagcgctatgggaaaacgtgagaaacttttgcgtgtgattaagaatcctgtgacccagtacctgcctctaaactctcataaaatagggttctcttttagctcnnnnnaattggttaaaatgaacaagtatgttactacagttg

SEQ ID NO: 245 - protein, 220 aa, Euphorbia esula
  misc_feature (208)..(209): Xaa can be any naturally occurring amino acid
MVRLHGIKGPKRKRREEKYDKEEDEADEQQNEPENEEQKDEMEQVEEQSYEMEGIPSVPSDQNAKKPGVIFVLEKASLEVAKVGKIYQILNSDDHSNFLRKHKKDPADYRPDIVFQALLSILDSPINKAGRLRAVYVKTDKGVLFEVKPHVRIPRTYKRFAGVMLQLLQKLSISAMGKREKLLRVIKNPVTQYLPLNSHKIGFSFSSXXLVKMNKYVTTV

SEQ ID NO: 246 - DNA, 690 bp, Selaginella moellendorffii
atggcggacgatactgccgtccaagacgctagcgttggccagggcgatcgcgacgacgacaagagtggagtgatcatcgttctcgagcgcgcgtcgctggagaccgccaaggtcggcaagacttatcagctgctcaattgcgacgatcacgcgaattttctgaggaagcacaagcgcgatccagcgttgtatcgtccggatatcttgcatcaggcccttctagcgatcctcgacagtccactcaacaaagctgggcgattgaaagctctctatgtcaagactgagaacaatgttctcatccaagtaaatcctcacattcgtctccctcgaacgtttaaacgcttttgtggactcatggcacagttgcttcaaaagctaagtattcgtgctacgaatgggcctgataaactcctgcgagttgtaaaacagccagtcactcgacacctcccggctggagttcgtcgaatcggactatcttacagagcaccgaaagtcgtgcaactaagagactacgtcgcagcctctggacccgaagaaactctagtttttgtagtgggagccatggctcatggaaaaatcgaggccgattacattgacgatctagtcgcagtgtcagagtatcctttgagtgcagcgtgctgcataggacggatttgcaatgctttagaacaacactggcagattatatga

SEQ ID NO: 247 - protein, 229 aa, Selaginella moellendorffii
MADDTAVQDASVGQGDRDDDKSGVIIVLERASLETAKVGKTYQLLNCDDHANFLRKHKRDPALYRPDILHQALLAILDSPLNKAGRLKALYVKTENNVLIQVNPHIRLPRTFKRFCGLMAQLLQKLSIRATNGPDKLLRVVKQPVTRHLPAGVRRIGLSYRAPKVVQLRDYVAASGPEETLVFVVGAMAHGKIEADYIDDLVAVSEYPLSAACCIGRICNALEQHWQII

SEQ ID NO: 248 - DNA, 1133 bp, Physcomitrella patens
ggccaaacctcgagctctcgtgatttctctcgtcgctgcaacgatgggtgggaaggaggaggatcgtgatccagagatggcagaaagttccgacgaggaaattgcagaggcgagcgctgatcctgctcccgtgaagagccttacagcgcctgatggcggcgtctggtttgtgctcgagaaagcgtctttggaggtcgccaaagtgggaaagaattatcagctgcttaactgtgacgaccatgctaattttttgcgcaaacataaacgagatcctgcacagtaccgccccgatattttacaccaggcgttgctggcaattcttgatagtccgatgaacaaggctggaaagttgaaaggactctatgtacatacagagaagaatgtgctcattcagatcaatccacacattcgcataccaagaacttttaagagattttgcggactgatggtgcaactgcttcaaaaacttgttatccgagctactaatgggcctgataagttgatgaaagttgtaaagcaacctgtaactcgacatttgcccattggtgcccggcggataggaatgtcatacagtgctcctaaagttgtacaattgaaagattacattttgactaccaaagaagatactcctctcgtctttgtggtgggggcaatgtctcatgggaagattgaagtggattatatagatgatcttgtcgcagtgtcagcttaccctctcagtgcgatgtgggccatcgcacgtatttgcaacgcactagagacgcagtggaatatcgtataacagtgcacctgtacaagcacactggtagttatagcttttaggttttttttgaaaggaaaatggagtgactgtaattctcgtttactgtctcaagtgaaatctagatattctctggatggttttaattatatttgtttatgagatcttgtcctatgtgaggcttgcttttctctgctctagtggtatttaaattctagaccaacaaagtgatttgctggggtatttgtaacccgatgactaccacattgttgatgcagacagtaatccttggggtgtaattgccacatgttaaaacccaatggagaacatttggaaacgtttgaatatcaagatttccgccaggaagtctttc

SEQ ID NO: 249 - protein, 245 aa, Physcomitrella patens
MGGKEEDRDPEMAESSDEEIAEASADPAPVKSLTAPDGGVWFVLEKASLEVAKVGKNYQLLNCDDHANFLRKHKRDPAQYRPDILHQALLAILDSPMNKAGKLKGLYVHTEKNVLIQINPHIRIPRTFKRFCGLMVQLLQKLVIRATNGPDKLMKVVKQPVTRHLPIGARRIGMSYSAPKVVQLKDYILTTKEDTPLVFVVGAMSHGKIEVDYIDDLVAVSAYPLSAMWAIARICNALETQWNIV

SEQ ID NO: 250 - DNA, 830 bp, Yucca filamentosa
ctcgagtacgcgaaagttggaaagaatttccaaatcctgaactcagatgatcatgcaaatttttgaagaagcagaatcggatccctgctgattacaggcctgatatccttcaccaggcccttcttgctatcctggatagtcccctaacaaaggcagggaggctacaggctctatatgtaagaacagaaaagggagtgctttttgaagttaaaccacatgttcgtatgccacgaacattcaagcgattttgtggtctcatgttgcagctacttcaaaatttgagtattactgctgctggcaagcgtgagaaacttctaaatgtcattaagaatcctgtaactcgtcatttgcctgtcaattcacgaagaataggcctatcatatagttcaccgaaagtggttcaaatgcgagattatgttgctgctgctagtgatgatgtcaaccttgtatttgtggtgggtgctatggcacatggaaagatcagtaatgattatacggatgattttatatcaatttccaatttccagctgagtgcggcttgctgcttaggccggatatgcaatgctttggaacagaaatggaagatactgtagatcagactccatctgctgctctccatttgactgagacttaactcggtattgagagctctcctccaccagcgatgactgtcagattgccgaaaccaccctgcgcttattaatatctgtaattctgcacttagtaatgtataaaagaatgctcttttgtttggtttttctcactaagttgcgttcttggtgattatctagttttagtattctctccaagtttctccctctaaaaaatcc

SEQ ID NO: 251 - protein, 122 aa, Yucca filamentosa
MPRTFKRFCGLMLQLLQNLSITAAGKREKLLNVIKNPVTRHLPVNSRRIGLSYSSPKVVQMRDYVAAASDDVNLVFVVGAMAHGKISNDYTDDFISISNFQLSAACCLGRICNALEQKWKIL

SEQ ID NO: 252 - DNA, 654 bp, Physcomitrella patens
cctgctcccgtgaagagccttacagcgcctgatggcggcgtctggtttgtgctcgagaaagcgtctttggaggtcgccaaagtgggaaagaattatcagctgcttaactgtgacgaccatgctaattttttgcgcaaacataaacgagatcctgcacagtaccgccccgatattttacaccaggcgttgctggcaattcttgatagtccgatgaacaaggctggaaagttgaaaggactctatgtacatacagagaagaatgtgctcattcagatcaatccacacattcgcataccaagaacttttaagagattttgcggactgatggtgcaactgcttcaaaaacttgttatccgagctactaatgggcctgataagttgatgaaagttgtaaagcaacctgtaactcgacatttgcccattggtgcccggcggataggaatgtcatacagtgctcctaaagttgtacaattgaaagattacattttgactaccaaagaagatactcctctcgtctttgtggtgggggcaatgtctcatgggaagattgaagtggattatatagatgatcttgtcgcagtgtcagcttaccctctcagtgcgatgtgggccatcgcacgtatttgcaacgcactagagacgcagtggaatatc

SEQ ID NO: 253 - protein, 148 aa, Physcomitrella patens
MNKAGKLKGLYVHTEKNVLIQINPHIRIPRTFKRFCGLMVQLLQKLVIRATNGPDKLMKVVKQPVTRHLPIGARRIGMSYSAPKVVQLKDYILTTKEDTPLVFVVGAMSHGKIEVDYIDDLVAVSAYPLSAMWAIARICNALETQWNI

SEQ ID NO: 254 - DNA, 899 bp, Mesembryanthemum crystallinum
  misc_feature (869)..(869): n is a, c, g, or t
ccggttggcttctctgctccgtcgtcgcttcatactattcagcctctttctctcttgtgtgccctgcttatcttgcggatattttatgggctttggtaatttgcagctctactgaattattctctgcagttggacaaagagatgccgaggccgtttgcagtgaaagggaagaagaggaagaagagagaagaaaactatgacagggaggaatttgaacaaatggtaaatgaagataatacagatgcaaatatccaaacgcaagctgaagatgaaaatttagtggatgatttggtgagagatatgcccggtattcccattacggttaaggatcagaataaccagtccggagcagtttttatccttgaaagggcctccttggaagttgccaaagttggaaagacgtatcaaattttgaactccgaggatcatgcaaatttcctgcggaaacacaataagaaccctgctgattacaggccagacattgctcaccaggctcttctaatgattttggacagccccctgaataaggctgggaggattaaagctgtttacgttagaactgagaaaggtgtactttttgaggttaaacctcatgttcgtattcctaggacgtacaagcggttcgctggtatcatgttgcagctgctacagaaacttagcatatctgctgttggcaagcgggacaaactttttcgtgtgataaagaatcctgtcacccaatatctacctcttaattcacggaaaataggcttctcatacagctcagaaaaagttagttgaaattcaaaaatatgtggctccttgtaaggatgatgtgaatttcctttttggggtggtgctattgctcatgggaagattgaaattgactntgtggatgaatacatttcaatttcaggaaa

SEQ ID NO: 255 - protein, 212 aa, Mesembryanthemum crystallinum
MPRPFAVKGKKRKKREENYDREEFEQMVNEDNTDANIQTQAEDENLVDDLVRDMPGIPITVKDQNNQSGAVFILERASLEVAKVGKTYQILNSEDHANFLRKHNKNPADYRPDIAHQALLMILDSPLNKAGRIKAVYVRTEKGVLFEVKPHVRIPRTYKRFAGIMLQLLQKLSISAVGKRDKLFRVIKNPVTQYLPLNSRKIGFSYSSEKVS

SEQ ID NO: 256 - DNA, 898 bp, Picea glauca
  misc_feature (762)..(762): n is a, c, g, or t
  misc_feature (791)..(792): n is a, c, g, or t
  misc_feature (844)..(849): n is a, c, g, or t
  misc_feature (851)..(863): n is a, c, g, or t
  misc_feature (892)..(892): n is a, c, g, or t
  misc_feature (894)..(894): n is a, c, g, or t
  misc_feature (896)..(896): n is a, c, g, or t
gtgccctagagtttctgggacggatatttcttctcggaatctgcagacttagagcctgtttggcggagtcctgttgaagcccaatattttgaaaagcacagagattgacgagatggatggaggtattaagcgtaagagaagcagggaagaagacgaagatgcggcaggagcaggaacacaagacatagaaactgagctagtgggattgccagcgctgcctaccatcaaaaagggcggagaaggagtgatttttattctggaaaaggcatccttggaggttgccaaagtcggcaagacataccaacttttgaatgttgatgaccatggtcatttcctgcggaaacacaaacaggacctagcaacatttcggcctgatattgttcaccaggctctattggcaattttggatagccctcttaacaaggctggaaggcttagtgctgtttatgtgcaaactcagaagaaagtgcttatacaagtgaatccccatgttcgtcttccaagaaccttcaagcgtttttgtgggttgatggtgcaacttctgcaaaaactgagcattcgtgcgactaatgggccagataaaatcctacgtgtgataaaaaatccagtcacaaaacatctacccagtgaagctcgtcgaattgggttatcatacagtgcacccaaagtagttaagcttcatgactatgttgctgcttccagtgacaagattcccctcgtatttgtggttggggcaatggctcatgggaagattaatgcagnttacattgatgattttatctcaatttcannatatcctctcagtgctgcatgttgcataggccgcatctgcaatgcagttgannnnnngnnnnnnnnnnnnnaggagtgagcaagtaatttctgtaaacancntnag

SEQ ID NO: 257 - protein, 252 aa, Picea glauca
  misc_feature (217)..(217): Xaa can be any naturally occurring amino acid
  misc_feature (227)..(227): Xaa can be any naturally occurring amino acid
  misc_feature (244)..(251): Xaa can be any naturally occurring amino acid
MDGGIKRKRSREEDEDAAGAGTQDIETELVGLPALPTIKKGGEGVIFILEKASLEVAKVGKTYQLLNVDDHGHFLRKHKQDLATFRPDIVHQALLAILDSPLNKAGRLSAVYVQTQKKVLIQVNPHVRLPRTFKRFCGLMVQLLQKLSIRATNGPDKILRVIKNPVTKHLPSEARRIGLSYSAPKVVKLHDYVAASSDKIPLVFVVGAMAHGKINAXYIDDFISISXYPLSAACCIGRICNAVXXXXXXXXE

SEQ ID NO: 258 - DNA, 763 bp, Phaseolus coccineus
  misc_feature (755)..(755): n is a, c, g, or t
ggggggagaattggaatttgtttgaggctgaggcaatgacacgacctttcggtgtgaaggggaagaagcgaaagcactcccaatccaaacagtactcagaagaagaacaccaacagccgccaccaaagaaagcggttgctgaagagagcaaagaaccgtcaccagaaccgtcaccagaaccagaaagagaatcagaaccagcaccaacagaagaggatgaattgagtggtatcccaattgtgcccagtgagaaaaacagtaccaaacccaacgtcatcttcatcctcgaaaaagcttctctcgaagtcgccaaagtcggcaagacatatcaacttttgaactccgatgaccatgccaatttcctccgaaaaaataacaagaatcctggagattataggcctgatattacacatcaatctctgctatcgattctggatagcccactgaataaagctggaagattgcgaagtgtttatataaggacggagaaaggtgttcttatagaggttaagccctttgttcgaattcccagaacattcaaacgttttgctggtgttatgttggaactgcttcaaaagctgagcatatctgctgttggcaagcgcgagaaactcctccgaaccataaaaaatcctgtcacgcaatatttgcctgttaactcacgaaaaataggtctatcatatagttcagaaaaccttgtagatatggatgactatgtatcaactatttccagcaatacggaccttggttttggnggtaagga

SEQ ID NO: 259 - protein, 242 aa, Phaseolus coccineus
MTRPFGVKGKKRKHSQSKQYSEEEHQQPPPKKAVAEESKEPSPEPSPEPERESEPAPTEEDELSGIPIVPSEKNSTKPNVIFILEKASLEVAKVGKTYQLLNSDDHANFLRKNNKNPGDYRPDITHQSLLSILDSPLNKAGRLRSVYIRTEKGVLIEVKPFVRIPRTFKRFAGVMLELLQKLSISAVGKREKLLRTIKNPVTQYLPVNSRKIGLSYSSENLVDMDDYVSTISSNTDLGFGGK

SEQ ID NO: 260 - DNA, 1206 bp, Pinus taeda
gtgtgtttgtgaacagtaaaatctaccatagccgcgaaaactgtattccgtctgaaaaccggccggggtccgtgctttacccttaaatcgtcgacgaggtttgtgctgttcgttgcctacgttgcctagctggttgcctggtttttattcaaccaaacccttgggctgcttcgagtgattgagaaaggccagttcacgccattgttgctctgaaggttgacaaaatggatagaggtattaagcgcaagaggagtagggaagaagatgaagatgcagcagattcagcaacacaagacatagaaactgaactagtaggattgccagcaccacctcccatcgtaaaaggtggagaagaagtgattttcatcctggagaaggcacatttggaggttgccaaagttggcaagacataccaacttctaaactgcgatgaccatcgtcattttctgcgaaaacacaaacaggacctagcactatttcggcctgatattgttcaccaggctctattggcaattttggacagccctcttaacaagtctggaagggttagtgcagtatatgtgcaaactcagaagaaagtgcttatacaagtgaatccccatgttcgtcttccaagaaccttcaagcggttttgtgggttgatggtgcaacttctgcaaaaattgagcattcgtgcaactaatgggccagataaactcctacatgtgataaaaaatccagttacaaaatatctacctagtgaagcccatcgaattgggctatcatacagtgcacccaaagtagttaagcttcatgactatgttgctgcttccactgacaagattcctctcatttttgtggttggggcaatggctcatgggaaaattgatgtagactacattgatgattttatctcaatttcagaatatcctctcagtgccgcatgttgcataggccgcatttgcaatgcagttgaacagaagtggaaaatcttgtaggagtgagcaaataatttctgtaaacatatttagcaaatctaatggaggattttcgattgattgccagggacagtgcttcctggcaatgactagaatctagcccagttgtatgctaacaggtcaaagttttttaaatgaatttgttttgcatactcaaagtggacaatgtaaacatatttaaattttattcacgttattagttattaatatattagttttgcactttcag

SEQ ID NO: 261 - protein, 250 aa, Pinus taeda
MDRGIKRKRSREEDEDAADSATQDIETELVGLPAPPPIVKGGEEVIFILEKAHLEVAKVGKTYQLLNCDDHRHFLRKHKQDLALFRPDIVHQALLAILDSPLNKSGRVSAVYVQTQKKVLIQVNPHVRLPRTFKRFCGLMVQLLQKLSIRATNGPDKLLHVIKNPVTKYLPSEAHRIGLSYSAPKVVKLHDYVAASTDKIPLIFVVGAMAHGKIDVDYIDDFISISEYPLSAACCIGRICNAVEQKWKIL

SEQ ID NO: 262 - DNA, 777 bp, Phaseolus coccineus
  misc_feature (754)..(754): n is a, c, g, or t
tttggagaattgggatttgtttgaggctgaggcaatgacacgacctttcggtgtgaaggggaagaagcgaaagcactcccaatccaaacagtactcagaagaagaacaccaacagccgccaccaaagaaagcggttgctgaagagagcaaagaaccgtcaccagaaccgtcaccagaaccagaaagagaatcagaaccagcaccaacagaagaggatgaattgagtggtatcccaattgtgcccagggagaaaaacagtaccaaacccaacgtcatcttcatcctcgaaaaagcttctctcgaagtcgccaaagtcggcaagacatatcaacttttgaactccgatgaccatgccaatttcctccgaaaaaataacaagaatcctggagattataggcctgatattacacatcaatctctgctatcgattctggatagcccactgaataaagctggaagattgcgaagtgtttatataaggacggagaaaggtgttcttatagaggttaagccctttgttcgaattcccagaacattcaaacgttttgctggtgttatgttggaactgcttcaaaagctgagcatatctgctgttggcaagcgcgagaaactcctccgaaccataaaaaatcctgtcacgcaatatttgcctgttaactcacgaaaaataggtctatcatatagttcagaaaaccttgtagatatggatgactatgtatcaactatttccagcaatacggaccttggttttggnggtaaggagccaatggcccatgg

SEQ ID NO: 263 - protein, 248 aa, Phaseolus coccineus
MTRPFGVKGKKRKHSQSKQYSEEEHQQPPPKKAVAEESKEPSPEPSPEPERESEPAPTEEDELSGIPIVPREKNSTKPNVIFILEKASLEVAKVGKTYQLLNSDDHANFLRKNNKNPGDYRPDITHQSLLSILDSPLNKAGRLRSVYIRTEKGVLIEVKPFVRIPRTFKRFAGVMLELLQKLSISAVGKREKLLRTIKNPVTQYLPVNSRKIGLSYSSENLVDMDDYVSTISSNTDLGFGGKEPMAHG

SEQ ID NO: 264 - DNA, 803 bp, Citrus sinensis
  misc_feature (30)..(30): n is a, c, g, or t
  misc_feature (34)..(35): n is a, c, g, or t
caaaaatccagctgattacaggcctgacancctnnatcaggctctcctatcaattttagacagccgactaaccaaggctgggaggttacaagctgtctatgttagaaccgataaaggtgttctttttgaagttaaaccacatgttcgtctaccgaggacatataagcgttttgctggtatcatgttgcagctgctgcaaaaactaagcataacagctgttggcaagcgtgagaaattattgcgtgtgatcaagaatcctgtcacccaatatttacctgtaaactccagaaagataggtttctcatatagttcagaaaaattggttaagatgaggaattgtgtggctcccatcagtgatgacgacaaccttgtttttgtgggtggtgcaatggcacatgggaaaatcgattgtgattacacagatgatttaatagcaatttctggctatccactgagtgctgcctgttgcattgcaaggatttgcgaagctttggaggataagtggaatctgttgtaaacgtctctttttagttctctctttgttttttcttcttttcccagcttgtagtaattgtttatttcacttttaaagtgatacttgtgtaactggaaatgctgagcttgtggattgtttgtgttctgagggatgaactttttaggttatatactaacctaaagaatttttgagagtatgaatctttgggactcggttgtaaactagttggattagatttaggtgtttatttggacgagcagagggaacatcatgtatgcaaggagaatccgtcctttttttctttttc

SEQ ID NO: 265 - protein, 111 aa, Citrus sinensis
MLQLLQKLSITAVGKREKLLRVIKNPVTQYLPVNSRKIGFSYSSEKLVKMRNCVAPISDDDNLVFVGGAMAHGKIDCDYTDDLIAISGYPLSAACCIARICEALEDKWNLL

SEQ ID NO: 266 - DNA, 1214 bp, Triticum aestivum
ccacgcgtccgctcaaacccccgcagcccggcgccggcgcgaagcgaagcgaagcgagaagaagacatggggcggccgtacgcagtcaaggggaagaagaagcggaagctggaaggcggcgaagcctcgcgcgcccctccggccgacgccgaggcggtggagcaagaggtgaaggaaaatgaggaggtgatggagggggaggcggcggcagaggcttttgccgaggaggtgggggaggggatccccatcgtgccccagcctgtcgacagtaagcggcggccgggcgctatcttcgtacttgagagggcctgcctcgaggtcggcaaagtcggcaagggtatgcaaatcttgaattcggatgattcacgcaaattatttgaggaagcagaatcgcaatccagctgattataggcctgatatcattcaccaggcactgcttgcaatatttgatagccctctaactaaggctgggaggttacaagctgtttatgttaggactgaaaagggagtgttgtttgaaatcaagcctcatgttcgcatgccacggacgttcaaacgtttctgtggcttgatgtcacagttattgcaaaagctgagcatcactgcagttgggaggcgtgagaagctcctttaatgttattaaaaatcctgttacccagtatctacctgttggcgtacggaaaattggcctttcatatagtgcggagaaggcagttaatttgtttgactatgttgctaagtccaatgatgatgaacctcttgtgtttgtggttggtgccatggcccatggaaaggttgacaaggaatactcagatgattacatacagattagcggttaccctctcagtgctgcctgctgcctgaatcgaatatgcagtgccttggagcagaaatggaacatccagtgaagggaagtttgaaaacgaacattacatctttgtgatcagatttttatgtactcattagcgctcatagtattgttgtgccttttcatgtcttatgtctacagtattagttttgtcgagacatgaatcactggctgtaaaagtattaacactgaatgtttcaagtgcttatgctccttgcagttgtcatttttggtgaaatttgctttgcttgaagcgtcctcaactgatatttaagcatagcctgaccatatttatgcccaaaatctcgcggctgtgtgtttggttcactgctgcgcagccagatgc

SEQ ID NO: 267 - protein, 112 aa, Triticum aestivum
MGRPYAVKGKKKRKLEGGEASRAPPADAEAVEQEVKENEEVMEGEAAAEAFAEEVGEGIPIVPQPVDSKRRPGAIFVLERACLEVGKVGKGMQILNSDDSRKLFEEAESQSS

SEQ ID NO: 268 - DNA, 675 bp, Amborella trichopoda
gacttatcaaatattgaattgtgatgatcatgcaacttaccttaagaagaaaaatcgtgatcctgcagcttacaggcctgacattattcatcaggctctccttgcagtgctggatagccccctcaataaggctggcagactgaaagcagtatatgtgcagacagagaaaaatgtgctaattcgagtaaatcctcacgtgcgaataccaagaacaataaagcgtttctgtggtctcatggtgcagttgcttcagaagctttctatacgtgctactaatgggcctgatattcttctccgtgtagtcaagaatcctgtgacacgccatttacctattgattctcgtcggatagggctgtcatatagttcaccaaaggtagttcagttgcacgactatgtcactgatgcaaaagatgatgtcaacctcgtttttgtggttggtgctatggcccatggaaaaattactgcagattacattgatgattttatttctgtttcggaataccctttgagtgccgcatgttgcattggtcgtatctgcaacgtagtggagagaaagtggaacattttgtaacttcatacattttttcccccttatatttattcatgtaaaatttggtgtcctccatgaaaaagtggatgaaattttgaagttcatagatgcctttctttctcaaa

SEQ ID NO: 269 - protein, 111 aa, Amborella trichopoda
MVQLLQKLSIRATNGPDILLRVVKNPVTRHLPIDSRRIGLSYSSPKVVQLHDYVTDAKDDVNLVFVVGAMAHGKITADYIDDFISVSEYPLSAACCIGRICNVVERKWNIL

SEQ ID NO: 270 - DNA, 598 bp, Gossypium hirsutum
ggcacgagacataacacatcaggctctactgtcgattctagacagtccggtcaataaggctgggagattgcaagctgtgtatgttagaactgagaaaggtgtactttttgaagttaaacctcatgttagaattccgaggacatataagcggttctctggtataatgttgcaactgctacaaaaattaaatataactgctgttggcaagcgggaaaagcttttacgagtgataaagaatcccgtaaccaattattttcctgttaattctcgcaaaataggtttctcatatagctcagacaaattagttaaaatgaggaaatacgtagatgctgttggtgatgatgtgaatcttgtttttgtggtgggtgcaatggcccatgggaaaatagaggtagattatatagatgattttatagcgatttccggttatccactaagtgctgcaatgtgcattgcaaggattactgaagctttggcagataagtggagcatattgtaacactcttatgtctctctctgcttcaatggcttcgattttgcgataggttatcagttgtatttcacaaattgtttgatgcaatagtaaaaattattctac

SEQ ID NO: 271 - protein, 111 aa, Gossypium hirsutum
MLQLLQKLNITAVGKREKLLRVIKNPVTNYFPVNSRKIGFSYSSDKLVKMRKYVDAVGDDVNLVFVVGAMAHGKIEVDYIDDFIAISGYPLSAAMCIARITEALADKWSIL

SEQ ID NO: 272 - DNA, 691 bp, Chlamydomonas reinhardtii
atggtcgctggagggttgcagcccccaagcattgacgaggaggaggctgcggcgcgcgctgtgggccagggcgttatttttatcctcgatgatgctcagttagaggttgcgcaagtcggcaagacctaccagctgctgaactgtgatgaccacgcgacatatcttcgaaagcacaaaaaggacccggcgctgtaccgcccagacatttgccaccaggcgcttctaaacgtgctcgacagcccgctcaacaaggccgggaaaatcaaggctgtgtacgtgcgcacgcacaagaacgtgctgttctccatcaaccccaagacgcgcatcccgcgcaccatcaagcgcttctccggcctcatggtgcagctgctgcagaagctgtccatccgcgccaccaacggccctgacaagctgatgaaggtgattaaaggcccggtgactaagcaccttccgctcaactgcaagcgcgtgggcttttcattcgccgcagataagcacgtggccatccatgagtacgtggcggggctggaggacagcgggcccattgtgttcgtggtgggcgccttcgcgcacggcaagatcgaggcgccctgggtggatgaggagctaaacatcagcgagtacccgctgtcggcggcctactgcctggcgcgcatcacgcaggcgttcgagatgaagtggaagatcgtgt

SEQ ID NO: 273 - protein, 230 aa, Chlamydomonas reinhardtii
MVAGGLQPPSIDEEEAAARAVGQGVIFILDDAQLEVAQVGKTYQLLNCDDHATYLRKHKKDPALYRPDICHQALLNVLDSPLNKAGKIKAVYVRTHKNVLFSINPKTRIPRTIKRFSGLMVQLLQKLSIRATNGPDKLMKVIKGPVTKHLPLNCKRVGFSFAADKHVAIHEYVAGLEDSGPIVFVVGAFAHGKIEAPWVDEELNISEYPLSAAYCLARITQAFEMKWKIV

SEQ ID NO: 274 - DNA, 514 bp, Persea americana
gaaaaccggatgaggcctcctcgttcgaattacccggaattccgattcttccttccaatcaaaaacccaaggcgggtgtgatattcgtgctcgagagggcttctttggaagtcgccaaagtgggaaagacataccagattctgaactcggacgatcattcaaatttcctgagaaagcataaccggaatccagctgattataggcccgacattgttcatcaggctctccttgcaatactggatagcccccttaataaggctggaaggctacaggcactctatgtgaagacagagaagggggttctttttgaagttaagccacatgttcgtatgccaagaacatttaagcggttttgtggagttatgttgcaactgctgcagaaattgagcataactgccactagtaagcgtgaaaaacttctgcgcgttatcaagaatcctgtaactcggcatttgcctgtcaattctcgtaaaataggattctcatatagttcagaaaagttagttcagctacg

SEQ ID NO: 275 - protein, 62 aa, Persea americana
MPRTFKRFCGVMLQLLQKLSITATSKREKLLRVIKNPVTRHLPVNSRKIGFSYSSEKLVQLR

SEQ ID NO: 276 - DNA, 675 bp, Ostreococcus taurii
atggacccgccgccgagcgacgacgggtcgaccgcggacgcgcgcgcgggggggtacgtcttcgtcctcgagctcgcgacgctggagacggcgaaagttgggaagggctacgcggtgttgaactgcgacgatcacgcaaacttcattcggcggcacgggaaacagccgggggattaccgaccggacatttgtcaccaggcgctgttgtcgatcctggattcgccgttgaataaagcggggaaggtgcgagggatatacgtgaacacgcagaagaatgtcttgtttgaggtgtcgccgaagacgcggttgccgaggacgtttaagcggttttgcggactcgtggcgcagttgttgcaaaaattgagcgtgcgctcgagcaacggaccggagaagttgatgcgggtggtgaagcagccggtgacgcgatactttccggcgggagcgaggcgggttgggttctcgttcagcgcgcccgaggtgaagcggttgccggagtacgtgcgggcgctgccggaggacgcgacggtggtgttcaccgtgggcgcgatggcgcacggaaaggtggacgtggcgtacacggatgattttatctccgtgtcaaagtatccactgagcgcggcgtgttgtttggggagaatatgtaacgcgttggagctcaagcacgacatcgtgtga

SEQ ID NO: 277 - protein, 224 aa, Ostreococcus taurii
MDPPPSDDGSTADARAGGYVFVLELATLETAKVGKGYAVLNCDDHANFIRRHGKQPGDYRPDICHQALLSILDSPLNKAGKVRGIYVNTQKNVLFEVSPKTRLPRTFKRFCGLVAQLLQKLSVRSSNGPEKLMRVVKQPVTRYFPAGARRVGFSFSAPEVKRLPEYVRALPEDATVVFTVGAMAHGKVDVAYTDDFISVSKYPLSAACCLGRICNALELKHDIV

SEQ ID NO: 278 - DNA, 857 bp, Volvox carteri
cttttattgtacgcactccccatccaatttactccaaattcctctttttgccttaacaaagctgcgaaccctattaccctaccgccttaaaatttatcacgaaacagttgaagcatcgccacagtgttcacatcttcgctcaatatcttagcagagtttgcggaatggttgccggcggcctccaaccgcccccaattgaagaggaggaggaggccctccgggcgcaaggacagggtgtaattttcatccttgatgatgctcagctagaagtggcgcaagttggcaagacgttccagcttctcaactgcgacgaccatgccacttaccttcgaaaacacaaaaaggacccggcattgtaccgtccagatatctgccaccaggcgctcctgaacatcttggacagcccgctcaataaagcagccaaaattaaggctgtgtacgtccgcacacacaagaacgtgctattctcgattaaccccaagacgcggataccccgcaccatcaaacgtttttcgggccttatggtccaactgttgcaaaagctcagcatccgagcgaccaacggaccggataagctcatgaaggtgattaagggcccggttaccaagtacctgcctttggactgtaagcgcgtgggcttctccttcgccgctgccaagcgcgtggctatccacgattatgtggcagccatggatgacagcaagccggtggttttcgtggtgggggcctttgcgcacggccgcatcgaggcgccttgggtggatgaggaactcaacgtgtcagagtacccgctcagcgcagcgtactgcatcagccgcatcacgaatgcgtttgagatgaagtggaaaatcgtatag

SEQ ID NO: 279 - protein, 230 aa, Volvox carteri
MVAGGLQPPPIEEEEEALRAQGQGVIFILDDAQLEVAQVGKTFQLLNCDDHATYLRKHKKDPALYRPDICHQALLNILDSPLNKAAKIKAVYVRTHKNVLFSINPKTRIPRTIKRFSGLMVQLLQKLSIRATNGPDKLMKVIKGPVTKYLPLDCKRVGFSFAAAKRVAIHDYVAAMDDSKPVVFVVGAFAHGRIEAPWVDEELNVSEYPLSAAYCISRITNAFEMKWKIV

SEQ ID NO: 280 - DNA, 678 bp, Ostreococcus sp. RCC809
atggaaccgcccccgcccgatcccgagacgccggcgtccgcgctcgacggcggtgggtacgtcttcgtcctcgaactcgcgacgctggagacggccaaggttgggaaagggtacgccatcctcaactgcgacgaccacgccaactttattcgacgacacgggaaacagccaggagatcatcgaccggacatttgtcatcaggcgctgttggcgatcctggactcgccgctgaacaaggcggggagggtgaaggcgatttacgtcaacacgcaaaagaatgtgttgtttcgcgtgtcgccgaagacgcgcgtgccgcggacgtttaaacggttttgtggactcatcgcgcagttgttgcaaaaactgagcgtgcgggcgagtaatggaccggagaagttgatgcaggtggtgaaacagccggtgacgagatattttcccgcgggggcgaggagagtgggattttcgtttagcgcgcccgaggtgaaaaagttgcccgattacgtaaagtcgttaccggaagacgcgacggtggtgttcacggtgggcgcgatggcgcacgggaaagtggacgtagcgtacacggatgatttcatctccgtgtcgcagtatccgttgagcgcggcgtgttgtatcggaaagatatgcaacgcgttggagttgaagcacgacatagtctaa

SEQ ID NO: 281 - protein, 225 aa, Ostreococcus sp. RCC809
MEPPPPDPETPASALDGGGYVFVLELATLETAKVGKGYAILNCDDHANFIRRHGKQPGDHRPDICHQALLAILDSPLNKAGRVKAIYVNTQKNVLFRVSPKTRVPRTFKRFCGLIAQLLQKLSVRASNGPEKLMQVVKQPVTRYFPAGARRVGFSFSAPEVKKLPDYVKSLPEDATVVFTVGAMAHGKVDVAYTDDFISVSQYPLSAACCIGKICNALELKHDIV

SEQ ID NO: 282 - DNA, 669 bp, Ostreococcus lucimarinus
atggagccgccgccgccggacgacgacgcgaaccgcaaggacggcgggtacgtcttcgtcctcgagctcgcgacgctcgagacggccaaggttgggaaagggtacgcgattctgaattgcgacgaccacgcaaacttcatccgtcgacacgggaaacagccgggcgatcaccgaccggacatctgccatcaggcgctgctggcgatattggactcgccgctgaacaaggctgggatggtgaaggcgatatacgtgaacacgcagaagaacgtgctgttcagggtgtcgccgaagacgcgcgtgccgcggacgtttaagcggttttgcggattgatggtgcagttgttgcagaaattgagcgtacggtcgtcgaacggaccggaaaaattgatgcaggtggtgaaacagccggtgacgaagtacttcccggcgggagcgagaagggtggggttttcgtttagcgcgcccgaggtgaagaaattgcccgaatacgtcgaggcgctgccggaggacgcggcggtggtgtttacgatcggggcgatggcgcacgggaaggttgatgtggcgtacacggatgattttatatccgtgtcgcggtatccgctcagcgcggcgtgctgcatcgggaggatatgcaacgcgttggagctgaagcacgacatcgtgtga

SEQ ID NO: 283 - protein, 222 aa, Ostreococcus lucimarinus
MEPPPPDDDANRKDGGYVFVLELATLETAKVGKGYAILNCDDHANFIRRHGKQPGDHRPDICHQALLAILDSPLNKAGMVKAIYVNTQKNVLFRVSPKTRVPRTFKRFCGLMVQLLQKLSVRSSNGPEKLMQVVKQPVTKYFPAGARRVGFSFSAPEVKKLPEYVEALPEDAAVVFTIGAMAHGKVDVAYTDDFISVSRYPLSAACCIGRICNALELKHDIV

SEQ ID NO: 284 - DNA, 672 bp, Micromonas RCC299 3
atggagaccccaaaacttgacgaagatagcgcagctgttccaggtgaaggttatatttttgtcctggaaaaagctacgcttgaggcggcgaagattgggaaggcttatcagatccttaattgcgacgaccacgccaacttccttcgccggcatggaaaggatcccgccaattttcgtccggacatcgtgcaccaggagctgctcgctattcttgatagtcctttgaacaaggcaggtcgcgtgaatgccgtttacgtacacacccagaaaaacgttctgatcaagataagttcacaaacccgaataccacgcacattcaagcgcttctgtggcttgatggttcagctgcttcaaaaactttcgatccgtgcagcaaatggacctgagaagctcttcaaggttgtgaaggggccggtgacgaagtattttcctgctggtgcccgtcgtgtcgggttttctttcagcgcagctgatgtgaaggatttcaagtcatatataaacgagcttcccagtgacgcttgcgtgatctttacacttggtgcaatgagccacgggatgatcgactcaacatatacagatgacctgatatccgtgagccattatcctctgagtggtgcgtgttgcatcgcgcgtatcacaaattgtctggagaacaagttcggcattttgtga

SEQ ID NO: 285 - protein, 223 aa, Micromonas RCC299 3
METPKLDEDSAAVPGEGYIFVLEKATLEAAKIGKAYQILNCDDHANFLRRHGKDPANFRPDIVHQELLAILDSPLNKAGRVNAVYVHTQKNVLIKISSQTRIPRTFKRFCGLMVQLLQKLSIRAANGPEKLFKVVKGPVTKYFPAGARRVGFSFSAADVKDFKSYINELPSDACVIFTLGAMSHGMIDSTYTDDLISVSHYPLSGACCIARITNCLENKFGIL

SEQ ID NO: 286 - protein, 50 aa, Artificial sequence
  motif 4
  VARIANT (5)..(5): Xaa can be Ser or Thr
  VARIANT (8)..(8): Xaa can be Ile or Leu
  VARIANT (11)..(11): Xaa can be Ser or Cys
  VARIANT (12)..(12): Xaa can be Glu or Asp
  VARIANT (13)..(13): Xaa can be Glu or Asp
  VARIANT (17)..(17): Xaa can be Phe or Tyr
  VARIANT (20)..(20): Xaa can be Arg or Lys
  VARIANT (21)..(21): Xaa can be Asn, His or Gln
  VARIANT (22)..(22): Xaa can be Lys or Asn
  VARIANT (23)..(23): Xaa can be Lys or Arg
  VARIANT (24)..(24): Xaa can be Asn or Asp
  VARIANT (26)..(26): Xaa can be Ala or Gly
  VARIANT (33)..(33): Xaa can be Ile or Thr
  VARIANT (34)..(34): Xaa can be Tyr or His
  VARIANT (39)..(39): Xaa can be Ser or Ala
  VARIANT (46)..(46): Xaa can be Asn or Thr
KVGKXYQXLNXXXHANXLRXXXXXPXDYRPDIXXQALLXILDSPLXKAGR

SEQ ID NO: 287 - protein, 50 aa, Artificial sequence
  motif 5
  VARIANT (1)..(1): Xaa can be Gly or Asn
  VARIANT (4)..(4): Xaa can be Phe or Ile
  VARIANT (6)..(6): Xaa can be Val or Ile
  VARIANT (7)..(7): Xaa can be Lys or Asn
  VARIANT (16)..(16): Xaa can be Tyr or Phe
  VARIANT (20)..(20): Xaa can be Ala or Cys
  VARIANT (22)..(22): Xaa can be Ile, Leu or Val
  VARIANT (24)..(24): Xaa can be Leu or Val
  VARIANT (25)..(25): Xaa can be Gln or Glu
  VARIANT (33)..(33): Xaa can be Thr, Ser ot Arg
  VARIANT (35)..(35): Xaa can be Val or Thr
  VARIANT (36)..(36): Xaa can be Gly or Asn
  VARIANT (37)..(37): Xaa can be Asn, Lys or Gly
  VARIANT (38)..(38): Xaa can be Arg or Pro
  VARIANT (39)..(39): Xaa can be Glu or Asp
  VARIANT (42)..(42): Xaa can be Leu or Met
  VARIANT (43)..(43): Xaa can be Arg or Asn
  VARIANT (44)..(44): Xaa can be Val or Thr
  VARIANT (45)..(45): Xaa can be Ile or Val
XVLXEXXPHVRIPRTXKRFXGXMXXLLQKLSIXAXXXXXKLXXXXKNPVT

SEQ ID NO: 288 - protein, 50 aa, Artificial sequence
  motif 6
  VARIANT (4)..(4): Xaa can be Asp or Pro
  VARIANT (13)..(13): Xaa can be Ser or Ala
  VARIANT (18)..(18): Xaa can be Glu or Asp
  UNSURE (19)..(19): Xaa can be any naturally occurring amino acid
  VARIANT (22)..(22): Xaa can be Val, Thr or Ile
  VARIANT (25)..(25): Xaa can be Phe or Tyr
  VARIANT (26)..(26): Xaa can be Ile or Val
  VARIANT (27)..(27): Xaa can be Ser or Ala
  VARIANT (28)..(28): Xaa can be Val or Ile
  VARIANT (30)..(30): Xaa can be Glu or Gly
  VARIANT (37)..(37): Xaa can be Trp, Cys or Tyr
  VARIANT (39)..(39): Xaa can be Ile or Leu
  VARIANT (40)..(40): Xaa can be Ala or Gly
  VARIANT (42)..(42): Xaa can be Val or Ile
  VARIANT (43)..(43): Xaa can be Cys or Thr
  VARIANT (44)..(44): Xaa can be Glu or Asn
  VARIANT (46)..(46): Xaa can be Val or Leu
  VARIANT (47)..(47): Xaa can be Ser or Glu
  VARIANT (48)..(48): Xaa can be Lys or Gln
DDTXLVFVVGAMXHGKIXXDYXDDXXXXSXYPLSAAXCXXRXXXAXXXKW

SEQ ID NO: 289 - DNA, 2194 bp, Oryza sativa; identical to SEQ ID NO: 97

SEQ ID NO: 290 - DNA, 56 bp, Artificial sequence
  primer: prm14800
ggggacaagtttgtacaaaaaagcaggcttaaacaatggtgaggccttatggtaaa

SEQ ID NO: 291 - DNA, 50 bp, Artificial sequence
  primer: prm14801
ggggaccactttgtacaagaaagctgggttgatcgacaaaatgcagagac

SEQ ID NO: 292 - DNA, 717 bp, Oryza sativa
atgccgtctcgcaccgccccgttcatctctcgcctccggctcctccgaaccgccgccgccctctccccgttctcgtcctccgcgccgccgcggcacagcccccgcatcctccgcgctatccctgtcggtgcgcctcacccgccgcgcgtctccgcagccgtctcgccgctggtccgtccggtcgccgccgggttcgcgctgttcagcatggccaccgccgcctcctccgccgcatccgtccacgacttcaccgtcaaggatgcaagtggcaaagatgtggacctgagcaccttcaaggggaaagtcctccttatcgtcaatgttgcatctcagtgtggcttgaccaattccaactacacggagctgagccagttgtatgagaagtacaaggaccagggttttgagatccttgctttcccatgcaaccagtttggtggacaggaacctggcactaatgaggagattgtccaatttgcttgcacccgcttcaaggccgagtatccaatttttgataaggttgatgttaatggtgacaacactgcacccatctacaagtttctgaagtccagcaaaggtggtcttttcggtgacaatatcaaatggaacttctccaagttcttggtcgacaaagaggggcgtgttgtggagcgctatgcgccaactacttctccactcagcatggagaaggacatcaagaagctgcttggaagttcttaa

SEQ ID NO: 293 - protein, 238 aa, Oryza sativa
MPSRTAPFISRLRLLRTAAALSPFSSSAPPRHSPRILRAIPVGAPHPPRVSAAVSPLVRPVAAGFALFSMATAASSAASVHDFTVKDASGKDVDLSTFKGKVLLIVNVASQCGLTNSNYTELSQLYEKYKDQGFEILAFPCNQFGGQEPGTNEEIVQFACTRFKAEYPIFDKVDVNGDNTAPIYKFLKSSKGGLFGDNIKWNFSKFLVDKEGRVVERYAPTTSPLSMEKDIKKLLGSS

SEQ ID NO: 294 - DNA, 507 bp, Populus trichocarpa
atggctagccaatccagtgctcaatcagttcatgatttcactgttaaggatgctagggaaaatgatgttgacctcagcatatataaggggaaggtcctcttgattgtcaatgttgcttcacaatgtggcttgaccaattcaaactacacggagttgacccagctatatgacaaatacagggatcaaggtttggagattctggcttttccatgcaatcagtttggatctcaggagccagggaacaatgaacaaatagtggagtttgcttgtactcgctttaaggctgactatcccatatttgataaggttgacgtgaatggtaagaatgctgctccaatttacaagttcttgaagtctaacaagggtggactttttggggacagcatcaaatggaacttttccaagttcctggtggataaagatggcaaagttgtggatcgttatgctcccactacttcccctcttagcattgagaaagatgtcaagaaactactggggattgcttaa

SEQ ID NO: 295 - protein, 168 aa, Populus trichocarpa
MASQSSAQSVHDFTVKDARENDVDLSIYKGKVLLIVNVASQCGLTNSNYTELTQLYDKYRDQGLEILAFPCNQFGSQEPGNNEQIVEFACTRFKADYPIFDKVDVNGKNAAPIYKFLKSNKGGLFGDSIKWNFSKFLVDKDGKVVDRYAPTTSPLSIEKDVKKLLGIA

SEQ ID NO: 296 - DNA, 699 bp, Populus trichocarpa
atggcttccttacctttctcctgttcatccgtaccgggtttgaaaatccatccaaaccctacaaaaatggctttctttgtcacttccatcaagtcctcacttgggccttccaaatctgcttttttgcaacgtgggttttctttacagtctccaaatcttcctgggtttgcctctaaagcccggtcctttggtgtttttgctagagctgctacagagaaatctgttcatgacttcactgttaaggatattaatgggaaggatgttgctcttagcaaatttaaggggaaagctctcttgattgttaatgtcgcttcgaaatgtggtttgacatcatcaaattattcggaactcacacacatatacgagaagtacaaaactcaaggcttcgaaattctggcttttccttgcaatcagtttggtgggcaagaacctggatcaaaccctgagattaaacaatttgcttgtaccaggtacaaagcagaatttccaatatttgataaggttgatgtgaatggaccaagtacagctccagtctatcagtttctgaaatcaagtgctggaggatttttaggtgatttgatcaagtggaactttgagaagttcttggtggacaagaatggcaaggttgtggagagatatcaaccaacaacatcacctttccaaatcgagaaggacattcagaagctcctcgcggcatga

SEQ ID NO: 297 - protein, 232 aa, Populus trichocarpa
MASLPFSCSSVPGLKIHPNPTKMAFFVTSIKSSLGPSKSAFLQRGFSLQSPNLPGFASKARSFGVFARAATEKSVHDFTVKDINGKDVALSKFKGKALLIVNVASKCGLTSSNYSELTHIYEKYKTQGFEILAFPCNQFGGQEPGSNPEIKQFACTRYKAEFPIFDKVDVNGPSTAPVYQFLKSSAGGFLGDLIKWNFEKFLVDKNGKVVERYQPTTSPFQIEKDIQKLLAA

SEQ ID NO: 298 - DNA, 741 bp, Zea mays
atgcctccccgccccgtcccactattctctcgcctgcgcttccgcctcccgagttgcgccgccgtctccatctccacccctccatcctccgcggcgcccctgcactacggccatcgcactcccctcgctagcccttttcctctgtccccaccttgcccgcgcatcctccgtgcggccgtcgcggtttcttcgctggatctgcgcccgatcaccggcgggttcgcgctattcagcatggctgctgcctcctccgccacctccgtccacgacttcaccgtcaaggatgctagcgggaaagatgtggaccttagcacctataaggggaaggttctgctcatagtcaatgttgcatctcagtgtggcttaaccaattccaactacacagagctgagccagttgtatgagaagtacaaggaccagggttttgagatccttgcattcccatgcaaccagttcggtgggcaggagcctggcactaatgaggagattgtccagtttgcttgtactcgcttcaaggctgagtatccaattttcgacaaggttgatgtcaatggtgacaatactgcacccatttacaagttcctgaagtccagcaaaggtagtctctttggcgataacataaaatggaacttctccaaattcttggttgacaaagaggggcatgttgtggagcggtatgcaccaacaacttccccactgagcatcgagaaggacatcaagaaactactagggagttcttaa

SEQ ID NO: 299 - protein, 246 aa, Zea mays
MPPRPVPLFSRLRFRLPSCAAVSISTPPSSAAPLHYGHRTPLASPFPLSPPCPRILRAAVAVSSLDLRPITGGFALFSMAAASSATSVHDFTVKDASGKDVDLSTYKGKVLLIVNVASQCGLTNSNYTELSQLYEKYKDQGFEILAFPCNQFGGQEPGTNEEIVQFACTRFKAEYPIFDKVDVNGDNTAPIYKFLKSSKGSLFGDNIKWNFSKFLVDKEGHVVERYAPTTSPLSIEKDIKKLLGSY

SEQ ID NO: 300 - DNA, 507 bp, Zea mays
atggccgccgcgtcgtccgccacctccgtccacgacttcaccgtcaaggattcgagcggcaaggacgttgacctcagcgtctacagggggaaggttcttctcatcgttaacgtcgcatcccaatgtggcttaaccaactccaactacactcagcaggcccagctctatgagaagtacaagaaccaaggctttgaaatcctcgctttcccgtgcaaccagtttggtgggcaggagcctggtaccaacgaggagattgcccagtttgcctgcacacgcttcaaggctgactaccccatctttgacaaggttgatgtcaatggtaacaatgctgcgcccatctacaagtttctgaaatctagcaagggtggccttttcggcgacagcatcaagtggaacttttccaagttcttggttgacaaggaggggcgtgttgtggatcgctatgctccaaccacttcacctctgagcattgagaaggatatcaagaagctgcttgggagctcttaa

SEQ ID NO: 301 - protein, 168 aa, Zea mays
MAAASSATSVHDFTVKDSSGKDVDLSVYRGKVLLIVNVASQCGLTNSNYTQQAQLYEKYKNQGFEILAFPCNQFGGQEPGTNEEIAQFACTRFKADYPIFDKVDVNGNNAAPIYKFLKSSKGGLFGDSIKWNFSKFLVDKEGRVVDRYAPTTSPLSIEKDIKKLLGSS

SEQ ID NO: 302 - DNA, 507 bp, Zea mays
atggccgcctcgtcgaccgccacctccgtccacgacttcatcgtcaaggatgcgagcggcaaagacgttgacctcagcacctacaaggggaaggttcttctcattgttaacgtcgcatcccagtgtggcttaaccaactccaactacactgagctggcccagctctatgagaagtacaaggaccaaggctttgaaatcctggctttcccatgcaaccagtttggtgggcaggagcctggtaccaatgaggagattgtccagtttgcctgcacacgcttcaaggctgagtaccccatcttcgacaaggttgatgtcaacggtagcaatgctgcgcccatctacaagttcttgaaatctagcaaaggtggccttttcggcgacagcatcaagtggaacttttccaagttcttggttgacaaggagggacgtgttgtggatcgctatgctccaaccacttcacccctgagcattgagaaggatatcaagaagctgcttgggagctcttaa

SEQ ID NO: 303 - protein, 168 aa, Zea mays
MAASSTATSVHDFIVKDASGKDVDLSTYKGKVLLIVNVASQCGLTNSNYTELAQLYEKYKDQGFEILAFPCNQFGGQEPGTNEEIVQFACTRFKAEYPIFDKVDVNGSNAAPIYKFLKSSKGGLFGDSIKWNFSKFLVDKEGRVVDRYAPTTSPLSIEKDIKKLLGSS

SEQ ID NO: 304 - protein, 168 aa, Triticum monococcum
MAAASSATSVHDFTVKDSSGKDVDLSVYKGKVLLIVNVASQCGLTNSNYTELSQLYPKYKDQGFEILAFPCNQFGGQEPGTNDEIVQFACTRFKAEYPIFDKVDVNGNNVSPLYKFLKSSKGGLFGDSIKWNFSKFLVDKEGHVVDRYAPTTSPLSIEKDIKKLLGSS

SEQ ID NO: 305 - protein, 169 aa, Triticum aestivum
MAAAASSASSVHDFTVKDASGKDVDLSTYKGKVLLIVNVASQCGLTNSNYTELAQLYEKYKDQGFEILAFPCNQFGGQEPGTNEEIVQFACTRFKAEYPIFDKVDVNGDNVAPVYKFLKSSKGSLFGDNIKWNFSKFLVDKEGHVVDRYAPTTSPLSIEKDIKKLLASY

SEQ ID NO: 306 - DNA, 504 bp, Triticum aestivum
atggccgccgcgtcctccgccacctccgtccacgacttcaccgtcaaggatgcaagcggcaaggacgtcgacctgagcgtctacaaggggaaggttcttctcattgttaacgtcgcttcgcagtgtggcttgaccaactccaactacaccgagctgagccagctgtacccgaagtacaaggaccaaggctttgagatcttggctttcccatgcaattttggtgggcaggagcctggcaccaatgatgagatagttcagtttgcctgcactcgcttcaaggctgagtaccccatttttgacaaggttgatgtcaacggcaacaatgtttctcccctatacaagttcctgaagtctagcaaaggtggccttttcggcgacagcatcaagtggaacttctccaagttcttggttgacaaggagggtcacgttgtggaccgctatgccccgaccacttcccccctgagcattgagaaggatatcaagaagctgcttgggagctcttag

SEQ ID NO: 307 - protein, 168 aa, Triticum aestivum
MAAASSATSVHDFTVKDASGKDVDLSVYKGKVLLIVNVASQCGLTNSNYTELSQLYPKYKDQGFEILAFPCNQFGGQEPGTNDEIVQFACTRFKAEYPIFDKVDVNGSNVSPLYKFLKSSKGGLFGDSIKWNFSKFLVDKEGHVVDRYAPTTSPLSIEKDIKKLLGSS

SEQ ID NO: 308 - DNA, 507 bp, Setaria italica
atggccgccgcgtcgtccaccacctccgtccacgacttcaccgtcaaggatgcaagcgggaaggatgttgacctcagcacctacaaggggaaggttctcctcattgtcaacgtcgcatcccagtgtggattaactaactccaactacactgagctggcccagctctatgagaagtacaaggaccaaggctttgagatcctggcttttccatgcaaccagtttggcgggcaggagcctggcaccaatgaggagattgtccagtttgcctgcacacgcttcaaggccgagtaccccatctttgacaaggttgatgtcaacggtaacaatgccgcacccatctacaaattcctgaagtctagcaagggtggcctcttcggtgacagcatcaagtggaacttctccaagttcttggttgacaaggaggggcgtgttgtggatcgctacgccccgaccacttcccctctgagcatcgagarggatatcaagaaactgcttgggagctcttaa

SEQ ID NO: 309 - protein, 168 aa, Setaria italica
  misc_feature (159)..(159): Xaa can be any naturally occurring amino acid
MAAASSTTSVHDFTVKDASGKDVDLSTYKGKVLLIVNVASQCGLTNSNYTELAQLYEKYKDQGFEILAFPCNQFGGQEPGTNEEIVQFACTRFKAEYPIFDKVDVNGNNAAPIYKFLKSSKGGLFGDSIKWNFSKFLVDKEGRVVDRYAPTTSPLSIEXDIKKLLGSS

SEQ ID NO: 310 - DNA, 516 bp, Sorghum bicolor
atgggtgcagcagagtcatcttccaagctcgctagctcagtccatggctttagcgtcaaggatgcgaggggaaatgatgtggagttgagtagatacaaggggaaggttctgcttatcgtgaatgtggcttcccaatgtggtctgacaaattccaactatactgagttgggatcactccacaagaaatatggcgaaaaaggatttgagatactggcgttcccatgcaaccagtttgttggacaagagccaggtaccaatgaacagattgctgagtttgcttgcacccgtttcaaagcagattttcctgtttttggcaaggttgatgtgaatggcgggaaggctgctccgctgtataagttcctgaagtcagagagaggcggtctgtttggagaacgcatcaaatggaacttcaccaagtttttggttgacaaagatgggcacgttgtgagcagatatgcaccaaccagctccccgttgagtattgagaatgacattcagaagcttttggaggcctag

SEQ ID NO: 311 - protein, 171 aa, Sorghum bicolor
MGAAESSSKLASSVHGFSVKDARGNDVELSRYKGKVLLIVNVASQGLTNSNYTELGSLHKKYGEKGGFEILAFPCNQFVGQEPGTNEQIAEFACTRFKADFPVFGKVDVNGGKAAPLYKFLKSERGGLFGERIKWNFTKFLVDKDGHVVSRYAPTSSPLSIENDIQKLLEA

SEQ ID NO: 312 - DNA, 756 bp, Sorghum bicolor
atgcctcccagccccgccccactattctctcgcctgcgcttccgcctccggacgtgcgccgccgtctccatctccacccgtccatcctccgcggcgcccctgcgctaccgtcgcactcgcctctctatcccttttcctctgtccccaccttgcccgcgcatcctccgcgccgccgccgccgccgcggtctcgtcgtcgctggatctgcgcgcgatagccggcgggttcgcgctgttcagcatggctgctgcctcctccgccacatccgtccacgacttcaccgtcaaggatgctagcgggaaagatgtggaccttagcacctacaaggggaaggttctactcatagtcaatgttgcatctcagtgtggcttgaccaattccaactacacagagctgagccagttgtatgagaagtacaaggaccagggttttgagatccttgctttcccatgtaaccagtttggtgggcaggagcctggcactaatgaggagattgtccagtttgcttgcactcgcttcaaggctgaatatccaattttcgacaaggttgatgtcaatggtgacaatactgcacccatctacaagttcctgaagtccagcaaaggtagtctctttggggagaacataaaatggaacttctccaagtttttggttgacaaagaggggcgtgttgtggagcggtacgcaccgacaacttccccactgagcatcgagaaggacatcaagaagctactagggagtccttcaaccttgtaa

SEQ ID NO: 313 - protein, 251 aa, Sorghum bicolor
  misc_feature (231)..(231): Xaa can be any naturally occurring amino acid
MPPSPAPLFSRLRFRLRTCAAVSISTRPSSAAPLRYRRTRLSIPFPLSPPCPRILRAAAAAAVSSSLDLRAIAGGFALFSMAAASSATSVHDFTVKDASGKDVDLSTYKGKVLLIVNVASQCGLTNSNYTELSQLYEKYKDQGFEILAFPCNQFGGQEPGTNEEIVQFACTRFKAEYPIFDKVDVNGDNTAPIYKFLKSSKGSLFGENIKWNFSKFLVDKEGRVVERYAPXTSPLSIEKDIKKLLGSPSTL

SEQ ID NO: 314 - DNA, 507 bp, Sorghum bicolor
atggccgccgcgtcgtccgccacctccgtccacgacttcaccgtcaaggatgccagcggcaaagacgttgacctcagcacctacaaggggaaggttcttctcatcgttaacgtcgcatcccagtgtggcttaaccaactccaactacaccgagctggcccagctctatgagaagtacaaggaccaaggctttgaaattctggctttcccatgcaaccagtttggtgggcaggagcctggtaccaacgaggagattgtgcagtttgcctgcacacgcttcaaggctgagtaccccatcttcgacaaggttgatgtcaatggtaacaatgctgcgcccatctacaagtttctgaaatctagcaagggtggcctttttggcgacagcatcaagtggaacttttccaagttcttggttgacaaggagggacgtgttgtggatcgctatgctccaacaacttcacctctgagcattgagaaggatatcaagaagctgcttgggagctcttaa

SEQ ID NO: 315 - protein, 168 aa, Sorghum bicolor
MAAASSATSVHDFTVKDASGKDVDLSTYKGKVLLIVNVASQCGLTNSNYTELAQLYEKYKDQGFEILAFPCNQFGGQEPGTNEEIVQFACTRFKAEYPIFDKVDVNGNNAAPIYKFLKSSKGGLFGDSIKWNFSKFLVDKEGRVVDRYAPTTSPLSIEKDIKKLLGSS

SEQ ID NO: 316 - DNA, 516 bp, Oryza sativa
atgggagcagctgagtcatcttcaaagctcgctggctccatccatgaattcactgtgaaggatgcgagggggagtgatgtggaactcagcagatacaagggaaaagttgttcttattgtgaatgctgcatctcgatgtggtctgacgaattacaactacactgaacttggtcagttatatgggaaatacaaggagacaggattggagatattggcgttcccatgcaatcaatttgcaggacaggagccaggcagcaatgagcaggttgtggagtttgcttgtacccgcttcaaagcagagtatcctatccttggcaaggttgatgtgaatggcggcaatgctgctccactgtacaagttcttgaagtcagagagaggtggcctcttcggagaacgcatcaaatggaacttcaccaaatttctggttgacaaagagggtcatgtggtgaaccgttatgcaccaaccagctccccattgagcattgagaatgacatcaagaacctgctaggggcttag

SEQ ID NO: 317 - protein, 171 aa, Oryza sativa
MGAAESSSKLAGSIHEFTVKDARGSDVELSRYKGKVVLIVNAASRCGLTNYNYTELGQLYGKYKETGLEILAFPCNQFAGQEPGSNEQVVEFACTRFKAEYPILGKVDVNGGNAAPLYKFLKSERGGLFGERIKWNFTKFLVDKEGHVVNRYAPTSSPLSIENDIKNLLGA

SEQ ID NO: 318 - DNA, 507 bp, Oryza sativa
atggccgccgcgccgtccgccacctccgtccacgacttcaccgtcaaggatgcaagcggaaaagacgtgaacctgagcacctacaaggggaaggttctcctcatcgttaacgtcgcatcccaatgtggcttaactaactccaactacactgagctgagccagctgtatgagaagtacaaggtccaaggctttgagatattggctttcccgtgcaatcagtttggagggcaggaacccggctccaatgaggagattgtccagtttgcttgcactcgcttcaaggctgagtatcccatttttgacaaggttgatgtcaacggtaacaatgctgcacccctgtacaagtatctgaagtctaacaaaggtgggcttttcggtgatagcatcaagtggaacttctccaaattcttggttgacaaggagggtcgcgtggtggatcgctatgcgcccaccacctcccctcttagtattgagaaggatatcaagaagctgcttgggagctcttaa

SEQ ID NO: 319 - protein, 168 aa, Oryza sativa
MAAAPSATSVHDFTVKDASGKDVNLSTYKGKVLLIVNVASQCGLTNSNYTELSQLYEKYKVQGFEILAFPCNQFGGQEPGSNEEIVQFACTRFKAEYPIFDKVDVNGNNAAPLYKYLKSNKGGLFGDSIKWNFSKFLVDKEGRVVDRYAPTTSPLSIEKDIKKLLGSS

SEQ ID NO: 320 - DNA, 516 bp, Hordeum vulgare
atgggcgcagcagagtcgtcttccaagcttggtggttccgtccatgacttcgtcgttaaggatgtgagaggaaatgatgtggagctcagcagatacaaggggaaagtcctgcttattgtcaatgtcgcatctcgatgcggtctggccaattccaactacacggaaatgggccagctctatgagaaataccgggagaaaggtttggagatattggcgttcccctgcaatcaatttgccgggcaggaaccagatagcgatgagaagattgtggagtttgcttgcgaccgcttccaagcacagtttcctatttttcgcaaggtggacgtgaatggcaacaatgctgccccgctgtacaagttcttgaagtcagagaggggcggtctattcggagagcgtatcaaatggaacttcaccaagtttctagttgacaaagaggggcatgtcatgaatcgatatgcaccgacctggtccccactcggcattgagaatgatatcaagaagctgttggaggtttga

SEQ ID NO: 321 - protein, 171 aa, Hordeum vulgare
MGAAESSSKLGGSVHDFVVKDVRGNDVELSRYKGKVLLIVNVASRCGLANSNYTEMGQLYEKYREKGLEILAFPCNQFAGQEPDSDEKIVEFACDRFQAQFPIFRKVDVNGNNAAPLYKFLKSERGGLFGERIKWNFTKFLVDKEGHVMNRYAPTWSPLGIENDIKKLLEV

SEQ ID NO: 322 - DNA, 714 bp, Hordeum vulgare
atgccttctcgccccgccccgttcatccaccgcctccgcctcctgagaagcgccgtcgtctctccctcctccgcgccgctgccgtgcagccgcccgcgcctcgccgtcccgttcgcgcagccgccgatccgcgcccccgccttcgccgccgccggctcgccgctgctccgcccggtcggcgcccgattctcgctgtccagcaacatggccgccgccgcctcctccgcctcctccgtccacgacttcaccgtcgaggatgcaagtggaaaagatgtcgatctgagcacctacaaggggaaggttctcctcattgtcaatgttgcatcccagtgtggattgaccaattccaactatacggaactcgctcagttgtatgagaagtacaaggaccagggttttgagatccttgctttcccatgcaaccagtttggtgggcaggaacctggcactaatgaggaaattgttcagtttgcttgcactcgcttcaaggccgagtatccaatttttgacaaggttgatgtcaatggtgacaatgttgcacctgtctacaagtttctgaagtcaagcaaaggcagtctcttcggggacaacatcaaatggaacttctccaagttcttggttgacaaggatgggaatgttgtggatcgctacgcgccgaccacctcccccctcagcatcgagaaggacatcaagaagctgctcgcgagttcttaa

SEQ ID NO: 323 - protein, 237 aa, Hordeum vulgare
MPSRPAPFIHRLRLLRSAVVSPSSAPLPCSRPRLAVPFSQPPIRAPAFAAAASPLLRPVGARFSLSSNMAAAASSASSVHDFTVKDASGKDVDLSTYKGKVLLIVNVASQCGLTNSNYTELAQLYEKYKDQGFEILAFPCNQFGGQEPGTNEEIVQFACTRFKAEYPIFDKVDVNGDNVAPVYKFLKSSKGSLFGDNIKWNFSKFLVDKDGNVVDRYAPTTSPLSIEKDIKKLLASS

SEQ ID NO: 324 - DNA, 498 bp, Hordeum vulgare
atggccgccgcgtcctccgccacctccgtccacgacttcaccgtcaaggatgcaagcggcaaggacgtcgacctgagcgtctacaaggggaaggttcttctcatcgttaacgtcgcatcccagtgtggcttaacgaactccaactacaccgagctgagccagctgtaccccaagtacaaggaccaaggctttgagatcttggctttcccatgcaatcagtttggtgggcaggagcctggcaccaatgatgagatcgttcagtttgcctgcactcgcttcaaggccgagtaccccatttttgacaaggttgatgtcaacggcaacaatgtttctcccctatacaagttcctgaagtctagcaaaggcggctttttcggcgacagcatcaaatggaacttctctaagttcttggttgacaaggagggtcacgttgtggaccgctatgccccgaccacttcccccatgagcattgagaaggatatcaagaagctgctttag

SEQ ID NO: 325 - protein, 165 aa, Hordeum vulgare
MAAASSATSVHDFTVKDASGKDVDLSVYKGKVLLIVNVASQCGLTNSNYTELSQLYPKYKDQGFEILAFPCNQFGGQEPGTNDEIVQFACTRFKAEYPIFDKVDVNGNNVSPLYKFLKSSKGGFFGDSIKWNFSKFLVDKEGHVVDRYAPTTSPMSIEKDIKKLL

SEQ ID NO: 326 - protein, 170 aa, Pinus taeda
MTGSSSKQSSSIYDFTVKDIRGNDVDLSVYKGKVLLIVNVASQCGLTNSNYTELNEVYTKYKDQGLEILAFPCNQFGGQEPGDNAQIAEVACTRFKAEFPIFDKVEVNGNNAAPLYKFLKSSKGGLFGDGIKWNFTKFLVDKDGNVVERYAPTTSPLSIEKDVKKLLGIA

SEQ ID NO: 327 - protein, 170 aa, Pinus taeda
MTESSSEQYSSIYDFTIKDIKGNDVDLSVYKGKILLIVNVASQCGLTTSNYKEMSDLYAKYKDQGLEILAFPCNQFGEEEPGDNAEIAEKICTRFKAEFPIFEKIEVNGSNAAPIYKFLKSSKGGTFGDSIKWNFTKFLVDKDGNVVERYAPTTSPLSFEKDVKKLLGVA

SEQ ID NO: 328 - protein, 170 aa, Pinus pinaster
MTGTSSKQYSSVHDLTVKDIRGNDVDLSLYRGKVLLIVNVASQCGLTTSNYTELNEVYAKYKDQGLQILAFPCNQFGGQEPGDNAQIAEVACTRFKAEFPIFDKVEVNGSSAAPMYKFLKSSKRGIFGEDIKWNFTKFMVDKDGNVVERYAPTTSPLSIEKDVKKLLGIA

SEQ ID NO: 329 - protein, 167 aa, Gnetum gnemon
MSSSSAKPQSVHEFTVKDIKGNDVSLADYKGKVLLIVNVASQCGLTNSNYKEMNELYSKYKDQGLEILAFPCNQFAGQEPGSNEEIAQTVCTRFKAEFPIFDKVDVNGNNAAPLYKYMRSVKGGIFGDSIKWNFSKFLVDQEGNVVDRYAPTTSPKSIEKDVKKLLG

SEQ ID NO: 330 - DNA, 501 bp, Zea mays
atggctgccgccagctccgtccacggcttcaccgtcaaggacgcaagcggcgaagacgtgcacctgagcaccttcaagggcaaggttctcctcatcgtcaacgtcgcatcacagtgtggcctgaccaactccaactacacggagcttgcccagctacacgagatgtacaaggaccaggatttcgagatccttgcgttcccgtgcaaccagttcggcgggcaggagcccggcacgagcgaggagatcgtccagctcgtctgcgctcgcttcaaggccaagtacccgattcttcacaaggtcgatgtgaacggcgaggacgctgcgcccatctacaagtttctgaaatccagcaagaccggccccatgggcgaagacatcaagtggaacttcgccaagttcttggtggacagacaggggcatgtcgccgagcggtatgctccgaccacctacccactcagcatccagaaggacatcaagaagctgctcggcgggagctattga

SEQ ID NO: 331 - protein, 166 aa, Zea mays
MAAASSVHGFTVKDASGEDVHLSTFKGKVLLIVNVASQCGLTNSNYTELAQLHEMYKDQDFEILAFPCNQFGGQEPGTSEEIVQLVCARFKAKYPILHKVDVNGEDAAPIYKFLKSSKTGPMGEDIKWNFAKFLVDRQGHVAERYAPTTYPLSIQKDIKKLLGGSY

SEQ ID NO: 332 - protein, 168 aa, Vitis vinifera
MASQSSPQSVHSFTVKDARGNDVDLSIYKGKALLIVNVASQCGLTNSNYTELHQLYEKYKDQGLEILAFPCNQFGAQEPGSNEEIEKFVCTRFKAEYPIFDKIDVNGDSAAPLYKFLKSSKGGLFGDNIKWNFSKFLVDKDGKVVDRYAPTTSPLSIEKDIKKLLGIS

SEQ ID NO: 333 - protein, 169 aa, Solanum tuberosum
MASQSSNPQSVYDFTVKDAKGKDVDLSIYKGKVLIIVNVASQCGLTNSNYTDMTELYKKYKDQGLEILAFPCNQFGGQEPGSIEDIQQMVCTRFKAEYPIFDKVDVNGDNAAPLYKFLKSSKGGFFGDGIKWNFSKFLIDKEGHVVDRYSPTTTPASMEKDIKKLLGVA

SEQ ID NO: 334 - protein, 171 aa, Spinacia oleracea
MASDSSAQPKSVHEFVVRDARGNDVDLSIYKGKVLLIVNVASQCGLTNSNYTEMTELYEKYRELGLEILAFPCNQFGNQEPGSNEEVLEFACTRFKAEYPIFDKVDVNGSNAAPIYKFLKSSKGGLFGDGLKWNFTKFLVDKDGNVVDRYAPTTSPKSIEKDVKKLLGIQK

SEQ ID NO: 335 - DNA, 717 bp, Populus trichocarpa
atgctcacttctcgctctcgcattctctctcaaaaatatctcaactttgcatcgttatctgcttctttcttattatcaaaacagtcatctttcaattccaagcaaacccttttgccatctttgcataactcgccagtttctttatattctcagtcaatcaaagcaggggtttcaaggcgtttattgggttctgtaagattcaatcattcaatggcaagccaatccagtcctcaatctgctcatgatttcactgttaaggatgctaagggaaatgatgttgacctcagcatttataaggggaaggtcctcttgattgtcaatgttgcttcacaatgtggcttgaccgattcaaactacacggagctgacccagctatatgcaaaatacaaggatcaaggtttggagattctggcttttccgtgcaatcaatttggatctcaggagcctgggagcagtgaagagattgtggagtttgcttgcactcgctttaaggctgaatatcccatatttgataaggttgaagtgaatggtaacaacgctgctccaatttacaaatacttgaagtctagcaagggtggactttttggggacaacattaaatggaatttttccaagttcctggtagataaagaaggcaaagttgtggatcgttatgctcccactacctcccctcttagcattgagaaagaggtgaagaaacttctggggattgcttaa

SEQ ID NO: 336 - protein, 238 aa, Populus trichocarpa
MLTSRSRILSQKYLNFASLSASFLLSKQSSFNSKQTLLPSLHNSPVSLYSQSIKAGVSRRLLGSVRFNHSMASQSSPQSAHDFTVKDAKGNDVDLSIYKGKVLLIVNVASQCGLTDSNYTELTQLYAKYKDQGLEILAFPCNQFGSQEPGSSEEIVEFACTRFKAEYPIFDKVEVNGNNAAPIYKYLKSSKGGLFGDNIKWNFSKFLVDKEGKVVDRYAPTTSPLSIEKEVKKLLGIA

SEQ ID NO: 337 - protein, 169 aa, Nicotiana tabacum
MASQSSKPQSIYDFTVKDAKGNDVDLSIYKGKVLIIVNVASQCGLTNSNYTDMTEIYKKYKDQGLEILAFPCNQFGGQEPGSIEEIQNMVCTRFKAEYPIFDKVDVNGDNAAPLYKFLKSSKGGFFGDSIKWNFSKFLVDKEGNVVDRYSPTTTPASMEKDIKKLLGVA

SEQ ID NO: 338 - protein, 169 aa, Nicotiana sylvestris
MASQSSKPQSIYDFTVKDAKGNDVDLSIYKGKVLIIVNVASQCGLTNSNYTDLTEIYKKYKDQGLEILAFPCNQFGGQEPGSIEEIQNMVCTRFKAEYPIFDKVDVNGDNAAPLYKFLKSSKGGFFGDSIKWNFSKFLVDKEGNVVDRYSPTTTPASMEKDIKKLLGVA

SEQ ID NO: 339 - protein, 269 aa, Medicago truncatula
MELLGVKYRQIGTWTREEASTRNLRYSVHTHNCRWLSEQSTSTTTRIRFISTTKRLLTAPLSSLLRFFSISTTLPNKPIIHKPLFTTLTPSLYFTLRRTDHTMASASNPQSIHDFTVKDAKGNDVNLGDYKGKVLIIVNVASQCGLTNSNYTELSQLYEKYKSKGLEILAFPCNQFGAQEPGSVEEIQNFVCTRFKAEFPVFDKVDVNGATAAPIYKYLKSSKGGLFGDGIKWNFSKFLVDKNGNVVDRYAPTTSPLSIEKDLLKLLDA

SEQ ID NO: 340 - protein, 168 aa, Malus x domestica
MAGHSESKSIHDFTVKDAKGNDVDLSTYKGKVLLIVNVASQCGLTNSNYTELAQLYEKYKTQGLEILAFPCNQFGAQEPGTNDEIVEFACTRFKAEYPIFDKVDVNGDNAAPIYKFLKSSKGGLFGDSIKWNFSKFLVDKEGKVVDRYAPTTSPLSIEKDVKKLLGVA

SEQ ID NO: 341 - protein, 170 aa, Mesembryanthemum crystallinum
MASQSTDQPKSIHDFIVKDARGNDVDLSIYKGKVLLIVNVASQCGLTNSNYPELTKLYEQYKDKGLEILAFPCNQFGNQEPGDNEQIMEFACTRFKAEFPIFDKVDVNGSNAAPVYKYLKSSKGGLFGDGIKWNFTKFLVDRDGKVVDRYAPTTSPASIEKDIKKLIGTS

SEQ ID NO: 342 - protein, 236 aa, Lotus japonicus
MLCTRILFFSRTIRFAAPLSSSSLHSFVFSNSPITLSRSYHSSLLTTTSFPIKSLVSTSTTPFSFTLRPDHTMAAPTSVYDFTVKDARGNDVNLGDYKGKVLLIVNVASQCGLTNSNYTELSQLYEKYKSKGLEILGFPCNQFGAQEPGDNEQIQEFVCTRFKAEFPVFDKVDVNGDSAAPLYKYLKSSKGGLFGDKIKWNFSKFLVDKEGNVVERYAPTTSPLSIEKDLVKLLGA

SEQ ID NO: 343 - protein, 169 aa, Lycopersicon esculentum
MATQTSNPQSVYDFTVKDAKGKDVDLSIYKGKVLIIVNVASQCGLTNSNYTDMTELYKKYKDQGLEILAFPCNQFGGQEPGNIEDIQQMVCTRFKAEYPIFDKVDVNGDNAAPLYRFLKSSKGGFFGDGIKWNFSKFLIDKEGHVVDRYSPTTSPASMEKDIKKLLGVA

SEQ ID NO: 344 - protein, 176 aa, Hevea brasiliensis
MASQSEPKSVYDFTVKDARGNDVDLSTYKGKVLLIVNVASQCGLTNSNYTELTQLYQKYKDQGLEILAFPCNQFGSQEPGTNEQIVEFACTRFKAEYPIFDKVDVNGNNAAPLYKFLKSSKGGIFGDNIKWNFSKFLVDKDGNVVDRYAPTTVPSQHREGCEETAGDCMSAQGRPN

SEQ ID NO: 345 - protein, 166 aa, Helianthus annuus
MATSKKSVYDFTVKDAKGQEVELSKYRGKVLLIVNVASQCGFTNSNYPELTTLYQKYKDQGLEILGFPSNQFNGQEPGSNEEIQEFVCTRFKAEYPVFAKVDVNGKNAEPLYSFLKASKGGILGDSIKWNFTKFLVDREGKVVDRYAPTTTPLSIEKDIKKLLGVA

SEQ ID NO: 346 - protein, 167 aa, Helianthus annuus
MASDSKKTVYDFTVKDVKGQDVELSKYKGKVLLIVNVASQCGFTNSNYPELTTLYQKYKDQGFEILAFPCNQFGGQEPGSNEEIQEFACTRFKAEYPVFSKVNVNGKEADPLYKFLKSSKGGFLGDSIKWNFTKFLVDREGKVVDRYAPTTSPLSIEKDIKKLLNVA

SEQ ID NO: 347 - protein, 170 aa, Gossypium hirsutum
MAAQSSKGSVHDFTVKDAKGNDVDLSIYKGKVLLIVNVASQCGLTNSNYTELSKLYEKYKDQGFEILAFPCNQFGGQEPGNNEEILEFACTRLKAEYPIFDKVDVNGENAAPIYKFLKASKGGALGGLLGDDIKWNFAKFLVDKEGHVVDRYAPTTSPISIEKDIKKLLG

SEQ ID NO: 348 - protein, 166 aa, Gossypium hirsutum
MASQSSKGSVHDFTVKDARGNDVDLSIYKGKVLLIVNVASQCGLTNSNYTELSKLYEQYKDQGFEILAFPCNQFGGQEPGNNEQILEFACTRFKAEYPIFDKVDVNGEKAAPVYKFLKSSKGGLFGDSIKWNFSKFLVDKEGHVFDRYAPTTSPLSIEKDIKKLLA

SEQ ID NO: 349 - DNA, 513 bp, Gossypium hirsutum
  misc_feature (504)..(504): n is a, c, g, or t
atggccagtcaatccagcaagcctcaatctatttatgacttcactgtcaaggatgctaagggtaatgatgttgatctcagcatttacaagggaaaggtccttattattgtcaatgttgcatcacagtgtggtctgacaaattcgaactatactgacttgaccgagatatacaagaagtacaaggatcaaggtttggagattcttgcattcccttgcaaccagttcggtgggcaggagcctggaagcattgaagagtcaatccagaacatggtttgcactcgcttcaaggccgagtacccaatattcgataaggttgatgtgaatggtgataatgctgctccactgtataagttcttgaaatcaagcaaaggtgggttctttggagatagtatcaagtggaacttctccaaattccttgttgacaaagaaggaaacgtcgtcgatcgctactctccaaccactactccagctagcatggagaaggatatcaagaaacttttgggngttgcttaa

SEQ ID NO: 350 - protein, 170 aa, Gossypium hirsutum
MASQSSKPQSIYDFTVKDAKGNDVDLSIYKGKVLIIVNVASQCGLTNSNYTDLTEIYKKYKDQGLEILAFPCNQFGGQEPGSIEESIQNMVCTRFKAEYPIFDKVDVNGDNAAPLYKFLKSSKGGFFGDSIKWNFSKFLVDKEGNVVDRYSPTTTPASMEKDIKKLLGVA

SEQ ID NO: 351 - protein, 167 aa, Citrus sinensis
MASQSKTSVHDFTVKDAKGQDVDLSIYKGKLLLIVNVASQCGLTNSNYTELSQLYDKYKNQGLEILAFPCNQFGAQEPGDNEQIQEFACTRFKAEFPIFDKVDVNGDNAAPLYKHLKSSKGGLFGDSIKWNFSKFLVDKEGNVVERYAPTTSPLSIEKDIKKLLETA

SEQ ID NO: 352 - protein, 241 aa, Cucumis melo
MFCSSSIRSLLTRNFFFSVRSLSSSPLLSNTRFFPDSKQTLLHIPQFPSVTRFVSPINSRSSLIASFLTRLDHTMATPSKTSVHDFTVKDAKGNDVDLSAYKGKVLLIVNVASQCGLTNSNYTELSQLYEKYKGHGFEILAFPCNQFGGQEPGSNEEIVQFACTRFKAEYPIFDKVDVNGNNAAPLYKFLKSSKGGLFGDAIKWNFSKFLVDKDGNVVDRYAPTTSPLSIEKDVKKLLGIA

SEQ ID NO: 353 - protein, 170 aa, Capsicum chinense
MASQSNRPQSVYDFTVKDAKGKDVDLSIYKGKVLIIVNVASQCGLTNSNYTDMTELYRKYKDKGLEILAFPCNQFGGQEPGSIEDIQQMVCTRFKAEYPVFDKVDVNGDNAAPLYKFLKSSKGGFFGDGIKWNFSKFLIDKEGNVVDRYSPTTSPASMEKDIKKLLGVAA

SEQ ID NO: 354 - protein, 169 aa, Brassica napus
MAASSEPKSIYDFTVKDAKGNDVDLSTYKGKVLLIVNVASQCGLTNSNYTELAQLYQKYKDHGFEILAFPCNQFGNQEPGSNEEIVQFACTRFKAEYPIFDKVDVNGDSAAPIYKFLKSSKGGLFGDGIKWNFAKFLVDKDGNVVDRYAPTTSPLSIEKDLKKLLGVTA

SEQ ID NO: 355 - protein, 171 aa, Brassica napus
MAAATSSSPKSVHDFTVKDAKGNEVDLSIYKGKVLLIVNVASQCGLTNSNYTELAQLYQKYKDHGFEILAFPCNQFGNQEPGSNEEIVQFACTRFKAEYPIFDKVDVNGDKAAPIYKFLKSSKGGLFGSGIKWNFSKFLVDKDGNVVDRYAPTTSPLSIEKDLKKLLGVTA

SEQ ID NO: 356 - DNA, 699 bp, Arabidopsis thaliana
atgcttcgctcctcaattcgacttctctatataagaagaaccagtcctctgcttcgaagtttatcatcatcatcatcatcatcatcatcaaaacgattcgattctgcgaaaccacttttcaattctcatcggattatttctcttccaatttctacaacgggagctaaactatctagatcggagcattcaatggctgcttcttccgaacccaaatctctttacgatttcaccgtcaaggatgctaagggaaacgatgttgatctaagcatctacaaagggaaggttcttttgattgtgaacgttgcttctcaatgtggcttgactaattcgaattatactgagcttgcgcagctgtatgagaagtacaaaggccatggtttcgagattcttgcgtttccgtgtaaccagtttgggaatcaagagcctggtactaatgaagagattgttcagtttgcttgtactcgtttcaaggctgagtacccgattttcgacaaggttgatgttaacggtgacaaagctgccccagtctacaagtttctgaaatcaagcaaaggcgggctctttggagacggcattaagtggaacttcgcaaagttcttggttgacaaagatggaaatgttgtcgatcgtttcgcaccaactacctcacctctcagcattgagaaggatgtgaagaagttgttgggagttactgcttaa

SEQ ID NO: 357 - protein, 232 aa, Arabidopsis thaliana
MLRSSIRLLYIRRTSPLLRSLSSSSSSSSSKRFDSAKPLFNSHRIISLPISTTGAKLSRSEHSMAASSEPKSLYDFTVKDAKGNDVDLSIYKGKVLLIVNVASQCGLTNSNYTELAQLYEKYKGHGFEILAFPCNQFGNQEPGTNEEIVQFACTRFKAEYPIFDKVDVNGDKAAPVYKFLKSSKGGLFGDGIKWNFAKFLVDKDGNVVDRFAPTTSPLSIEKDVKKLLGVTA

SEQ ID NO: 358 - DNA, 699 bp, Populus trichocarpa
atggcttccttacctttctcctgttcatccgtaccgggtttgaaaatccatccaaaccctacaaaaatggcttcctttgtcatttccatcaagtcctcacttgggccttccaaatctgcttttttgcaacgtgggttttctttacagtctccaaatcttcctgggtttgcctctaaagcccggtcctttggtgtttttgctagagctgctacagagaaatctgttcatgacttcactgttaaggatattaatgggaaggatgttgctcttagcaaatttaaggggaaagctctcttgattgttaatgtcgcttcgaaatgtggtttgacatcatcaaattattcggaactcacacacatatacgagaagtacaaaactcaaggcttcgaaattctggcttttccttgcaatcagtttggtgggcaagaacctggatcaaaccctgagattaaacaatttgcttgtaccaggtacaaagcagaatttccaatatttgataaggttgatgtgaatggaccaagtacagctccagtctaccagtttctgaaatcaagtgctggaggatttttaggtgatttgatcaagtggaactttgagaagttcttggtggacaagaatggcaaggttgtggagagatatcaaccaacaacatcacctttccaaatcgagaaggacattcagaagctcctcgcggcatga

SEQ ID NO: 359 - protein, 232 aa, Populus trichocarpa
MASLPFSCSSVPGLKIHPNPTKMASFVISIKSSLGPSKSAFLQRGFSLQSPNLPGFASKARSFGVFARAATEKSVHDFTVKDINGKDVALSKFKGKALLIVNVASKCGLTSSNYSELTHIYEKYKTQGFEILAFPCNQFGGQEPGSNPEIKQFACTRYKAEFPIFDKVDVNGPSTAPVYQFLKSSAGGFLGDLIKWNFEKFLVDKNGKVVERYQPTTSPFQIEKDIQKLLAA

SEQ ID NO: 360 - protein, 170 aa, Solanum tuberosum
MAGQPEKKPESVYDFTLKDAKGNDVDLSTYKGKVLLIVNVASKCGLTDSNYKDLNHLHEKYKDQGLEILAFPCNQFGAQEPGSNDEIVEFACTRFKSEFPIFDKIEVNGENTSPFYKFLKSAKWGLVGDNIQWNFAKFLVDKNGQVSDRYYPTTSPLSMERDIKVLLGIE

SEQ ID NO: 361 - protein, 8 aa, Artificial sequence
  motif 7
  VARIANT (3)..(3): Xaa can be Val or Ala
  VARIANT (6)..(6): Xaa can be Arg, Lys or Gln
VNXASXCG

SEQ ID NO: 362 - protein, 8 aa, Artificial sequence
  motif 8
  VARIANT (2)..(2): Xaa can be Ala or Gly
  VARIANT (5)..(5): Xaa can be Ser or Cys
LXFPXNQF

SEQ ID NO: 363 - protein, 6 aa, Artificial sequence
  motif 9
  VARIANT (4)..(4): Xaa can be Ser or Thr
WNFXKF

SEQ ID NO: 364 - protein, 23 aa, Artificial sequence
  motif 10
  VARIANT (17)..(17): Xaa can be Ser or Thr
  VARIANT (20)..(20): Xaa can be Glu or Gln
  VARIANT (22)..(22): Xaa can be Val or Gln
  VARIANT (23)..(23): Xaa can be Gln or Glu
EILAFPCNQFGGQEPGXNEXIXX

SEQ ID NO: 365 - protein, 34 aa, Artificial sequence
  motif 11
  VARIANT (8)..(8): Xaa can be Tyr or Phe
  VARIANT (19)..(19): Xaa can be Asp or Asn
  VARIANT (21)..(21): Xaa can be Ala or Thr
  VARIANT (24)..(24): Xaa can be Leu or Ile
CTRFKAEXPIFDKVDVNGXNXAPXYKFLKSSKGG

SEQ ID NO: 366 - protein, 29 aa, Artificial sequence
  motif 12
  VARIANT (6)..(6): Xaa can be Ser or Thr
  VARIANT (13)..(13): Xaa can be Glu or Asp
  VARIANT (15)..(15): Xaa can be Asn, His or Arg
  VARIANT (18)..(18): Xaa can be Asp or Glu
  VARIANT (29)..(29): Xaa can be Ile or Met
IKWNFXKFLVDKXGXVVXRYAPTTSPLSX

SEQ ID NO: 367 - protein, 50 aa, Artificial sequence
  motif 13
  VARIANT (5)..(5): Xaa can be Leu or Ile
  VARIANT (22)..(22): Xaa can be Glu or Asp
  VARIANT (23)..(23): Xaa can be Leu or Met
  VARIANT (24)..(24): Xaa can be Thr or Ser
  VARIANT (25)..(25): Xaa can be Gln or Glu
  VARIANT (35)..(35): Xaa can be Leu or Phe
GKVLXIVNVASQCGLTNSNYTXXXXLYEKYKDQGXEILAFPCNQFGGQEP

SEQ ID NO: 368 - protein, 34 aa, Artificial sequence
  motif 14
  VARIANT (8)..(8): Xaa can be Tyr or Phe
  VARIANT (21)..(21): Xaa can be Ala or Thr
  VARIANT (24)..(24): Xaa can be Leu or Ile
CTRFKAEXPIFDKVDVNGDNXAPXYKFLKSSKGG

SEQ ID NO: 369 - protein, 41 aa, Artificial sequence
  motif 15
  VARIANT (4)..(4): Xaa can be Ser, Gly or Asn
  VARIANT (10)..(10): Xaa can be Ser or Thr
  VARIANT (17)..(17): Xaa can be Glu or Asp
  VARIANT (19)..(19): Xaa can be Asn, Lys or Arg
  VARIANT (22)..(22): Xaa can be Asp or Glu
  VARIANT (31)..(31): Xaa can be Leu or Ala
  VARIANT (33)..(33): Xaa can be Ile or Met
  VARIANT (37)..(37): Xaa can be Ile or Val
FGDXIKWNFXKFLVDKXGXVVXRYAPTTSPXSXEKDXKKLL

SEQ ID NO: 370 - protein, 44 aa, Artificial sequence
  motif 16
FEILAFPCNQFGGQEPGTNEEIVQFACTRFKAEYPIFDKVDVNG

SEQ ID NO: 371 - protein, 50 aa, Artificial sequence
  motif 17
  VARIANT (2)..(2): Xaa can be Ile or Leu
  VARIANT (12)..(12): Xaa can be Gly or Ser
  VARIANT (16)..(16): Xaa can be Asp or Glu
  VARIANT (17)..(17): Xaa can be Ser or Asn
  VARIANT (32)..(32): Xaa can be His or Arg
  VARIANT (35)..(35): Xaa can be Asp or Glu
  VARIANT (46)..(46): Xaa can be Ile or Met
PXYKFLKSSKGXLFGXXIKWNFSKFLVDKEGXVVXRYAPTTSPLSXEKDI

SEQ ID NO: 372 - protein, 32 aa, Artificial sequence
  motif 18
  VARIANT (18)..(18): Xaa can be Thr or Val
  VARIANT (19)..(19): Xaa can be Tyr or Phe
VHDFTVKDASGKDVDLSXXKGKVLLIVNVASQ

SEQ ID NO: 373 - protein, 16 aa, Artificial sequence
  signature 1
  VARIANT (2)..(2): Xaa can be Lys or Arg
  VARIANT (3)..(3): Xaa can be Leu or Val
  VARIANT (4)..(4): Xaa can be Ile or Leu
  VARIANT (7)..(7): Xaa can be Val, Glu or Thr
  VARIANT (11)..(11): Xaa can be Ser, Thr or Ala
  VARIANT (12)..(12): Xaa can be Glu, Gln, Leu or Tyr
  VARIANT (13)..(13): Xaa can be Cys or Sec
  VARIANT (15)..(15): Xaa can be Leu or Thr
GXXXLIXNVAXXXGXT

SEQ ID NO: 374 - protein, 8 aa, Artificial sequence
  signature 2
  VARIANT (6)..(6): Xaa can be Arg, Lys or Gln
VNVASXCG

SEQ ID NO: 375 - protein, 8 aa, Artificial sequence
  signature 3
  VARIANT (3)..(3): Xaa can be Thr or Val
  VARIANT (5)..(5): Xaa can be Ser, Thr or Ala
  VARIANT (6)..(6): Xaa can be Arg, Lys, Glu, Gln or Ala
VNXAXXCG

SEQ ID NO: 376 - protein, 8 aa, Artificial sequence
  signature 4
  VARIANT (3)..(3): Xaa can be Thr or Val
  VARIANT (6)..(6): Xaa can be Lys, Arg, His, Leu or Gln
  VARIANT (8)..(8): Xaa can be Gly, Ser or Ala
VNXASXCX

SEQ ID NO: 377 - protein, 8 aa, Artificial sequence
  signature 5
LAFPCNQF

SEQ ID NO: 378 - protein, 6 aa, Artificial sequence
  signature 6
  VARIANT (4)..(4): Xaa can be Ser or Thr
WNFXKF

SEQ ID NO: 379 - DNA, 2194 bp, Oryza sativa; identical to SEQ ID NO: 97

SEQ ID NO: 380 - DNA, 1264 bp, Oryza sativa; identical to SEQ ID NO: 175

SEQ ID NO: 381 - DNA, 50 bp, Artificial sequence
  primer: prm15927
ggggacaagtttgtacaaaaaagcaggcttaaacaatgccgtctcgcacc

SEQ ID NO: 382 - DNA, 47 bp, Artificial sequence
  primer: prm15928
ggggaccactttgtacaagaaagctgggtcggcggtaaggttttaag

SEQ ID NO: 383 - DNA, 54 bp, Artificial sequence
  primer: prm15929
ggggacaagtttgtacaaaaaagcaggcttaaacaatggctagccaatccagtg

SEQ ID NO: 384 - DNA, 50 bp, Artificial sequence
  primer: prm15930
ggggaccactttgtacaagaaagctgggtaattaaacaaccatgccttga

SEQ ID NO: 385 - DNA, 56 bp, Artificial sequence
  primer: prm15925
ggggacaagtttgtacaaaaaagcaggcttaaacaatggcttccttacctttctcc

SEQ ID NO: 386 - DNA, 50 bp, Artificial sequence
  primer: prm15926
ggggaccactttgtacaagaaagctgggtctcatacatgtcactgctgcc

1-97. (canceled)

98. A method for enhancing yield-related traits in a plant relative to a control plant, comprising introducing and expressing in a plant:
a) a nucleic acid encoding an ELM2-related polypeptide, wherein said ELM2-related polypeptide comprises an Interpro accession IPR 000949, according to PFAM accession number PF01448 ELM2 domain, wherein said ELM2-related polypeptide comprises one or more motifs having at least 80% sequence identity with one or more of the following motifs:
(i) Motif 1 comprising the amino acid sequence of SEQ ID NO: 93;
(ii) Motif 2 comprising the amino acid sequence of SEQ ID NO: 94;
(iii) Motif 3 comprising the amino acid sequence of SEQ ID NO: 95;
b) a nucleic acid encoding a GPx-related polypeptide, wherein said GPx-related polypeptide comprises one or more motifs and/or signatures having at least 80% sequence identity with a motif and/or signature selected from the group consisting of motifs 7 to 18:
(i) Motif 7 comprising the amino acid sequence of SEQ ID NO: 361;
(ii) Motif 8 comprising the amino acid sequence of SEQ ID NO: 362;
(iii) Motif 9 comprising the amino acid sequence of SEQ ID NO: 363;
(iv) Motif 10 comprising the amino acid sequence of SEQ ID NO: 364;
(v) Motif 11 comprising the amino acid sequence of SEQ ID NO: 365;
(vi) Motif 12 comprising the amino acid sequence of SEQ ID NO: 366;
(vii) Motif 13 comprising the amino acid sequence of SEQ ID NO: 367;
(viii) Motif 14 comprising the amino acid sequence of SEQ ID NO: 368;
(ix) Motif 15 comprising the amino acid sequence of SEQ ID NO: 369;
(x) Motif 16 comprising the amino acid sequence of SEQ ID NO: 370;
(xi) Motif 17 comprising the amino acid sequence of SEQ ID NO: 371;
(xii) Motif 18 comprising the amino acid sequence of SEQ ID NO: 372;
and/or one or more signatures 1 to 6,
(i) Signature 1 comprising the amino acid sequence of SEQ ID NO: 373;
(ii) Signature 2 comprising the amino acid sequence of SEQ ID NO: 374;
(iii) Signature 3 comprising the amino acid sequence of SEQ ID NO: 375;
(iv) Signature 4 comprising the amino acid sequence of SEQ ID NO: 376;
(v) Signature 5 comprising the amino acid sequence of SEQ ID NO: 377;
(vi) Signature 6 comprising the amino acid sequence of SEQ ID NO: 378;
c) a nucleic acid encoding an EMG1-like polypeptide, wherein said EMG1-like polypeptide comprises an InterPro accession IPR005304 EMG1 domain corresponding to PFAM accession number PF03587, wherein said EMG1-like polypeptide comprises an EMG1 domain having at least 60% sequence identity with the EMG1 domain from amino acid 81 to 276 of SEQ ID NO: 179; or
d) a nucleic acid molecule encoding a WRKY-related polypeptide, preferably comprising one or more motifs selected from the group consisting of WRKYGQ motif, basic motif, coiled coil motif as defined herein.

99. The method of claim 98, wherein said EMG1-like polypeptide further comprises one of the motifs comprising the amino acid sequence of SEQ ID NO: 286, SEQ ID NO: 287 or SEQ ID NO: 288.

100. The method of claim 98, wherein:
a) said GPx-related polypeptide is encoded by a nucleic acid molecule selected from the group consisting of:
(i) a nucleic acid comprising the nucleotide sequence of SEQ ID NO: 292, 294 or 296;
(ii) a nucleic acid comprising the complement of the nucleotide sequence of SEQ ID NO: 292, 294 or 296;
(iii) a nucleic acid encoding a polypeptide comprising the amino acid sequence of SEQ ID NO: 293, 295 or 297, preferably as a result of the degeneracy of the genetic code, said nucleic acid can be deduced from the amino acid sequence of SEQ ID NO: 293, 295 or 297 and confers enhanced yield-related traits relative to or compared to control plants;
(iv) a nucleic acid having at least 30%, 31%, 32%, 33%, 34%, 35%, 36%, 37%, 38%, 39%, 40%, 41%, 42%, 43%, 44%, 45%, 46%, 47%, 48%, 49%, 50%, 51%, 52%, 53%, 54%, 55%, 56%, 57%, 58%, 59%, 60%, 61%, 62%, 63%, 64%, 65%, 66%, 67%, 68%, 69%, 70%, 71%, 72%, 73%, 74%, 75%, 76%, 77%, 78%, 79%, 80%, 81%, 82%, 83%, 84%, 85%, 86%, 87%, 88%, 89%, 90%, 91%, 92%, 93%, 94%, 95%, 96%, 97%, 98% or 99% sequence identity with the nucleotide sequence of SEQ ID NO: 292, 294 or 296, and conferring enhanced yield-related traits relative to or compared to control plants, wherein said nucleic acid encodes a polypeptide that is not the polypeptide of SEQ ID NO: 293, 295 or 297;
(v) a nucleic acid which hybridizes with any of the nucleic acids of (i) to (iv) under stringent hybridization conditions and confers enhanced yield-related traits relative to or compared to control plants, wherein said nucleic acid encodes a polypeptide that is not the polypeptide of SEQ ID NO: 293, 295 or 297;
(vi) a nucleic acid encoding a polypeptide having at least 50%, 51%, 52%, 53%, 54%, 55%, 56%, 57%, 58%, 59%, 60%, 61%, 62%, 63%, 64%, 65%, 66%, 67%, 68%, 69%, 70%, 71%, 72%, 73%, 74%, 75%, 76%, 77%, 78%, 79%, 80%, 81%, 82%, 83%, 84%, 85%, 86%, 87%, 88%, 89%, 90%, 91%, 92%, 93%, 94%, 95%, 96%, 97%, 98% or 99% sequence identity to the amino acid sequence of SEQ ID NO: 293, 295 or 297 and conferring enhanced yield-related traits relative to or compared to control plants; or
(vii) a nucleic acid comprising any combination(s) of features of (i) to (vi) above;
b) said WRKY-related polypeptide is encoded by a nucleic acid molecule selected from the group consisting of:
(i) a nucleic acid comprising the nucleotide sequence of SEQ ID NO: 102;
(ii) a nucleic acid comprising the complement of the nucleotide sequence of SEQ ID NO: 102;
(iii) a nucleic acid encoding the polypeptide comprising the amino acid sequence of SEQ ID NO: 103, preferably as a result of the degeneracy of the genetic code, said isolated nucleic acid can be deduced from the amino acid sequence of SEQ ID NO: 103 and confers enhanced yield-related traits relative to or compared to control plants;
(iv) a nucleic acid having at least 30%, 31%, 32%, 33%, 34%, 35%, 36%, 37%, 38%, 39%, 40%, 41%, 42%, 43%, 44%, 45%, 46%, 47%, 48%, 49%, 50%, 51%, 52%, 53%, 54%, 55%, 56%, 57%, 58%, 59%, 60%, 61%, 62%, 63%, 64%, 65%, 66%, 67%, 68%, 69%, 70%, 71%, 72%, 73%, 74%, 75%, 76%, 77%, 78%, 79%, 80%, 81%, 82%, 83%, 84%, 85%, 86%, 87%, 88%, 89%, 90%, 91%, 92%, 93%, 94%, 95%, 96%, 97%, 98% or 99% sequence identity with the nucleotide sequence of SEQ ID NO: 102, and conferring enhanced yield-related traits relative to or compared to control plants, wherein said nucleic acid encodes a polypeptide that is not the polypeptide of SEQ ID NO: 103;
(v) a nucleic acid which hybridizes with any of the nucleic acids of (i) to (iv) under stringent hybridization conditions and confers enhanced yield-related traits relative to or compared to control plants, wherein the first nucleic acid encodes a polypeptide that is not the polypeptide of SEQ ID NO: 103;
(vi) a nucleic acid encoding a polypeptide having at least 50%, 51%, 52%, 53%, 54%, 55%, 56%, 57%, 58%, 59%, 60%, 61%, 62%, 63%, 64%, 65%, 66%, 67%, 68%, 69%, 70%, 71%, 72%, 73%, 74%, 75%, 76%, 77%, 78%, 79%, 80%, 81%, 82%, 83%, 84%, 85%, 86%, 87%, 88%, 89%, 90%, 91%, 92%, 93%, 94%, 95%, 96%, 97%, 98% or 99% sequence identity to the amino acid sequence of SEQ ID NO: 103 and conferring enhanced yield-related traits relative to or compared to control plants; or
(vii) a nucleic acid comprising any combination(s) of features of (i) to (vi) above.

101. The method of claim 98, wherein said enhanced yield-related traits comprise increased yield relative to a control plant, and preferably comprise increased biomass and/or increased seed yield relative to a control plant.

102. The method of claim 98, wherein said enhanced yield-related traits are obtained under non-stress conditions.

103. The method of claim 98, wherein said enhanced yield-related traits are obtained under conditions of drought stress, salt stress or nitrogen deficiency.

104. The method of claim 98, wherein:
i) said nucleic acid encoding an ELM2-related polypeptide encodes any one of the polypeptides listed in Table A1 or is a portion of such a nucleic acid, or a nucleic acid capable of hybridizing with such a nucleic acid;
ii) said nucleic acid encoding a GPx-related polypeptide encodes any one of the polypeptides listed in Table A4 or is a portion of such a nucleic acid, or a nucleic acid capable of hybridizing with such a nucleic acid; or
iii) said nucleic acid encoding an EMG1-like polypeptide encodes any one of the polypeptides listed in Table A3 or is a portion of such a nucleic acid, or a nucleic acid capable of hybridizing with such a nucleic acid.

105. The method of claim 98, wherein:
i) said nucleic acid encoding an ELM2-related polypeptide encodes a polypeptide comprising the amino acid sequence of SEQ ID NO: 2 or SEQ ID NO: 4, or a homologue thereof having at least 90% overall sequence identity to SEQ ID NO: 2 or SEQ ID NO: 4;
or
ii) said nucleic acid encoding an EMG1-like polypeptide encodes a polypeptide comprising the amino acid sequence of SEQ ID NO: 179.

106. The method of claim 98, wherein said nucleic acid is operably linked to a constitutive promoter, a medium strength constitutive promoter, a plant promoter, a GOS2 promoter, or a GOS2 promoter from rice.

107. A plant obtained by the method of claim 98, or a plant part, seed or progeny of said plant, wherein said plant, or said plant part, seed or progeny, comprises a recombinant nucleic acid encoding the ELM2-related polypeptide, the GPx-related polypeptide, the EMG1-like polypeptide or the WRKY-related polypeptide.

108. A construct comprising:
(i) a nucleic acid encoding an ELM2-related polypeptide, a GPx-related polypeptide, an EMG1-like polypeptide or a WRKY-related polypeptide as defined in claim 98;
(ii) one or more control sequences capable of driving expression of the nucleic acid of (i); and optionally
(iii) a transcription termination sequence.

109. The construct of claim 108, wherein one of said control sequences is a constitutive promoter, a medium strength constitutive promoter, a plant promoter, GOS2 promoter or a GOS2 promoter from rice.

110. A method for making a plant having enhanced yield-related traits, increased yield, or increased seed yield and/or increased biomass relative to a control plant, comprising transforming the construct of claim 108 into a plant, plant cell or plant part.

111. A plant, plant part or plant cell transformed with the construct of claim 108.

112. A method for the production of a transgenic plant having enhanced yield-related traits, increased yield, or increased seed yield and/or increased biomass relative to a control plant, comprising:
(i) introducing and expressing in a plant cell or plant a nucleic acid encoding an ELM2-related polypeptide, a GPx-related polypeptide, an EMG1-like polypeptide or a WRKY-related polypeptide as defined in claim 98; and
(ii) cultivating said plant cell or plant under conditions promoting plant growth and development.

113. A transgenic plant having enhanced yield-related traits, increased yield, or increased seed yield and/or increased biomass relative to a control plant, resulting from modulated expression of a nucleic acid encoding an ELM2-related polypeptide, a GPx-related polypeptide, an EMG1-like polypeptide or a WRKY-related polypeptide as defined in claim 98, or a transgenic plant cell derived from said transgenic plant.

114. Harvestable parts of the plant of claim 107, wherein said harvestable parts are preferably biomass and/or seeds.

115. Products derived from the plant of claim 107 and/or from harvestable parts of said plant.

116. A method for manufacturing a product comprising:
a) growing the plant of claim 107; and
b) producing a product from or by said plant or parts or seeds thereof.

117. A plant, plant cell or plant part comprising the construct of claim 108.

118. A recombinant chromosomal DNA comprising the construct of claim 108.

119. A method of growing a transgenic plant comprising:
a) planting a transformed seed comprising a nucleic acid sequence encoding an ELM2-related polypeptide as defined in claim 98; and
b) growing a plant from said seed.
